(19) United States
(12) Patent Application Publication
(10) Pub. No.: US 2006/0194751 A1
(43) Pub. Date: Aug. 31, 2006

(54) Streptococcus pyogenes antigens

(75) Inventors: Andreas Meinke, Pressbaum (AT); Eszter Nagy, Vienna (AT); Birgit Winkler, Vienna (AT); Dieter Gelbmann, Andau (AT)

Correspondence Address: MCDONNELL BOEHNEN HULBERT & BERGHOFF LLP, 300 S. WACKER DRIVE, 32ND FLOOR, CHICAGO, IL, 60606, US

(73) Assignee: InterCell AG, Vienna (AT)

(21) Appl. No.: 10/548,463

(22) PCT Filed: Mar. 2, 2004
(86) PCT No.: PCT/EP04/02087

§ 371 Date: Sep. 2, 2005

(30) Foreign Application Priority Data
Mar. 4, 2003 (EP) 03450061.1

(51) Int. Cl. A61K 48/00; C07H 21/04; A61K 39/00; C07K 14/415; C07K 14/47

(52) U.S. Cl. 514/44; 536/23.1; 424/185.1; 530/350; 435/69.3; 435/320.1; 435/325

(57) ABSTRACT

The present invention discloses isolated nucleic acid molecules encoding a hyperimmune serum reactive antigen or a fragment thereof as well as hyperimmune serum reactive antigens or fragments thereof from S. pyogenes, methods for isolating such antigens and specific uses therefor

[0001] The present invention relates to isolated nucleic acid molecules, which encode antigens for Streptococcus pyogenes, which are suitable for use in preparation of pharmaceutical medicaments for the prevention and treatment of bacterial infections caused by Streptococcus pyogenes.

[0002] Streptococcus pyogenes, also called group A streptococci (GAS), is an important gram-positive extracellular bacterial pathogen and commonly infects humans. GAS colonize the throat or skin and are responsible for a number of suppurative infections and non-suppurative sequelae. It is primarily a disease of children and causes a variety of infections including bacterial pharyngitis, scarlet fever, impetigo and sepsis in humans. Decades of epidemiological studies have led to the concept of distinct throat and skin strains, where certain serotypes are often associated with throat or skin infections, respectively {Cunningham, M., 2000). GAS have been discovered responsible for streptococcal toxic shock syndrome associated necrotizing fasciitis which is recently resurgent in the USA {Cone, L. et al., 1987; Stevens, D., 1992} and has been described as the “flesh eating” bacterium which invades skin and soft tissues leading to tissue or limb destruction.

[0003] Several post-streptococcal sequelae may occur in humans subsequent to infection, such as acute rheumatic fever, acute glomerulonephritis and reactive arthritis. Acute rheumatic fever and rheumatic heart disease are of these the most serious autoimmune sequelae and have led to disability and death of children worldwide. S. pyogenes can also causes severe acute diseases such as scarlet fever and necrotizing fasciitis and has been associated with Tourette's syndrome, tics and movement and attention disorders.

[0004] Group A streptococci are the most common bacterial cause of sore throat and pharyngitis and account for at least 16% of all office calls in a general medical practice, season dependent {Hope-Simpson, R., 1981}. It primarily affects children in school-age between 5 to 15 years of age {Cunningham, M., 2000}. All ages are susceptible to spread of the organism under crowded conditions, for example in schools. GAS are not considered normal flora though, but pharyngeal carriage of group A streptococci can occur without clinical symptoms.

[0005] Group A streptococci can be distinguished by the Lancefield classification scheme of serologic typing based on their carbohydrate or classified into M protein serotypes based on a surface protein that can be extracted by boiling bacteria with hydrochloric acid. This has led to the identification of more than 80 serotypes, which can also be typed by a molecular approach (emm genes). Certain M protein serotypes of S. pyogenes are mainly associated with pharyngitis and rheumatic fever, while others mainly seem to cause pyoderma and acute glomerulonephritis {Cunningham, M., 2000}.

[0006] Also implicated in causing pharyngitis and occasionally toxic shock are group C and G streptococci, which must be distinguished after throat culture [Hope-Simpson, R., 1981; Bisno, A. et al., 1987}. Currently, streptococcal infections can only be treated by antibiotic therapy. However, 25-30% of those treated with antibiotics show recurrent disease and/or shed the organism in mucosal secretions. There is at present no preventive treatment (vaccine) available to avoid streptococcal infections.

[0007] Thus, there remains a need for an effective treatment to prevent or ameliorate streptococcal infections. A vaccine could not only prevent infections by streptococci, but more specifically prevent or ameliorate colonization of host tissues, thereby reducing the incidence of pharyngitis and other suppurative infections. Elimination of non-suppurative sequelae such as rheumatic fever, acute glomerulonephritis, sepsis, toxic shock and necrotizing fasciitis would be a direct consequence of reducing the incidence of acute infection and carriage of the organism. Vaccines capable of showing cross-protection against other streptococci would also be useful to prevent or ameliorate infections caused by all other beta-hemolytic streptococcal species, namely groups A, B, C and G.

[0008] A vaccine can contain a whole variety of different antigens. Examples of antigens are whole-killed or attenuated organisms, subfractions of these organisms/tissues, proteins, or, in their most simple form, peptides. Antigens can also be recognized by the immune system in form of glycosylated proteins or peptides and may also be or contain polysaccharides or lipids. Short peptides can be used since for example cytotoxic T-cells (CTL) recognize antigens in form of short usually 8-11 amino acids long peptides in conjunction with major histocompatibility complex (MHC). B-cells can recognize linear epitopes as short as 4-5 amino acids, as well as three-dimensional structures (conformational epitopes). In order to obtain sustained, antigen-specific immune responses, adjuvants need to trigger immune cascades that involve all cells of the immune system necessary. Primarily, adjuvants are acting, but are not restricted in their mode of action, on so-called antigen presenting cells (APCs). These cells usually first encounter the antigen(s) followed by presentation of processed or unmodified antigen to immune effector cells. Intermediate cell types may also be involved. Only effector cells with the appropriate specificity are activated in a productive immune response. The adjuvant may also locally retain antigens and co-injected other factors. In addition the adjuvant may act as a chemoattractant for other immune cells or may act locally and/or systemically as a stimulating agent for the immune system.

[0009] Approaches to develop a group A streptococcal vaccine have focused mainly on the cell surface M protein of S. pyogenes [Bessen, D. et al., 1988; Bronze, M. et al., 1988). Since more than 80 different M serotypes of S. pyogenes exist and new serotypes continually arise {Fischetti, V., 1989}, inoculation with a limited number of serotype-specific M protein or M protein derived peptides will not likely be effective in protecting against all other M serotypes. Furthermore, it has been shown that the M protein contains an amino acid sequence, which is immunologically cross-reactive with human heart tissue, which is thought to account for heart valve damage associated with rheumatic fever {Fenderson, P. et al., 1989}.

[0010] There are other proteins under consideration for vaccine development, such as the erythrogenic toxins, streptococcal pyrogenic exotoxin A and streptococcal pyrogenic exotoxin B {Lee, P. K., 1989}. Immunity to these toxins could possibly prevent the deadly symptoms of streptococcal toxic shock, but it may not prevent colonization by group A streptococci.

[0011] The use of the above described proteins as antigens for a potential vaccine as well as a number of additional candidates [Ji, Y. et al., 1997; Guzman, C. et al., 1999} resulted mainly from a selection based on easiness of identification or chance of availability. There is a demand to identify efficient and relevant antigens for S. pyogenes.

[0012] The present inventors have developed a method for identification, isolation and production of hyperimmune serum reactive antigens from a specific pathogen, especially from Staphylococcus aureus and Staphylococcus epidermidis (WO 02/059148). However, given the differences in biological property, pathogenic function and genetic background, Streptococcus pyogenes is distinctive from Staphylococcus strains. Importantly, the selection of sera for the identification of antigens from S. pyogenes is different from that applied to the S. aureus screens. Three major types of human sera were collected for that purpose. First, healthy adults below <45 years of age preferably with small children in the household were tested for nasopharyngeal carriage of S. pyogenes. A large percentage of young children are carriers of S. pyogenes, and they are considered a source for exposure for their family members. Based on correlative data, protective (colonization neutralizing) antibodies are likely to be present in exposed individuals (children with high carriage rate in the household) who are not carriers of S. pyogenes. To be able to select for relevant serum sources, a series of ELISAs measuring anti-S. pyogenes IgG and IgA antibody levels were performed with bacterial lysates and culture supernatant proteins. Sera from high titer non-carriers were included in the genomic based antigen identification. This approach for selection of human sera is basically very different from that used for S. aureus, where carriage or noncarriage state cannot be associated with antibody levels.

[0013] Second, serum samples from patients with pharyngitis were characterized and selected in the same way. The third group of serum samples obtained from individuals with post-streptococcal sequellae—such as acute rheumatic fever and glomerulonephritis—were used mainly for validation purposes. This latter group helps in the exclusion of epitopes, which induce high levels of antibodies in these patients, since post-streptococcal disease is associated with antibodies induced by GAS and reactive against human tissues, such as heart muscle, or involved in harmful immune complex formation in the kidney glomeruli. The genomes of the two bacterial species S. pyogeizes and S. aureus by itself show a number of important differences. The genome of S. pyogeizes contains app. 1.85 Mb, while S. aureus harbours 2.85 Mb. They have an average GC content of 38.5 and 33%, respectively and approximately 30 to 45% of the encoded genes are not shared between the two pathogens. In addition, the two bacterial species require different growth conditions and media for propagation. While S. pyogenes is a strictly human pathogen, S. aureus can also be found infecting a range of warm-blooded animals. A list of the most important diseases, which can be inflicted by the two pathogens is presented below. S. aureus causes mainly nosocomial, opportunistic infections: impetigo, folliculitis, abscesses, boils, infected lacerations, endocarditis, meningitis, septic arthritis, pneumonia, osteomyelitis, scalded skin syndrome (SSS), toxic shock syndrome. S. pyogenes causes mainly community aquired infections: streptococcal sore throat (fever, exudative tonsillitis, pharyngitis), streptococcal skin infections, scarlet fever, puerperal fever, septicemia, erysipelas, perianal cellulitis, mastoiditis, otitis media, pneumonia, peritonitis, wound infections, acute glomerulonephritis, acute rheumatic fever; toxic shock-like syndrome, necrotizing fasciitis.

[0014] The problem underlying the present invention was to provide means for the development of medicaments such as vaccines against S. pyogenes infection. More particularly, the problem was to provide an efficient, relevant and comprehensive set of nucleic acid molecules or hyperimmune serum reactive antigens from S. pyogenes that can be used for the manufacture of said medicaments.

[0015] Therefore, the present invention provides an isolated nucleic acid molecule encoding a hyperimmune serum reactive antigen or a fragment thereof comprising a nucleic acid sequence which is selected from the group consisting of:
[0016] a) a nucleic acid molecule having at least 70% sequence identity to a nucleic acid molecule selected from Seq ID No 1, 4-8, 10-18, 20, 22, 24-32, 34-35, 3840, 43-46, 49-51, 53-54, 57-61, 63, 65-71, 73 75-77, 81-82, 88, 91-94 and 96-150.
[0017] b) a nucleic acid molecule which is complementary to the nucleic acid molecule of a),
[0018] c) a nucleic acid molecule comprising at least 15 sequential bases of the nucleic acid molecule of a) or b)
[0019] d) a nucleic acid molecule which anneals under stringent hybridisation conditions to the nucleic acid molecule of a), b), or c)
[0020] e) a nucleic acid molecule which, but for the degeneracy of the genetic code, would hybridise to the nucleic acid molecule defined in a), b), c) or d).

[0021] According to a preferred embodiment of the present invention the sequence identity is at least 80%, preferably at least 95%, especially 100%.

[0022] Furthermore, the present invention provides an isolated nucleic acid molecule encoding a hyperimmune serum reactive antigen or a fragment thereof comprising a nucleic acid sequence selected from the group consisting of
[0023] a) a nucleic acid molecule having at least 96% sequence identity to a nucleic acid molecule selected from Seq ID No 64,
[0024] b) a nucleic acid molecule which is complementary to the nucleic acid molecule of a),
[0025] c) a nucleic acid molecule comprising at least 15 sequential bases of the nucleic acid molecule of a) or b)
[0026] d) a nucleic acid molecule which anneals under stringent hybridisation conditions to the nucleic acid molecule of a), b) or c),
[0027] e) a nucleic acid molecule which, but for the degeneracy of the genetic code, would hybridise to the nucleic acid defined in a), b), c) or d).

[0028] According to another aspect, the present invention provides an isolated nucleic add molecule comprising a nucleic add sequence selected from the group consisting of
[0029] a) a nucleic add molecule selected from Seq ID No 3, 36, 47-48, 55, 62, 72, 80, 84, 95.
[0030] b) a nucleic acid molecule which is complementary to the nucleic add of a),
[0031] c) a nucleic add molecule which, but for the degeneracy of the genetic code, would hybridise to the nucleic acid defined in a), b), c) or d).

[0032] Preferably, the nucleic add molecule is DNA or RNA.

[0033] According to a preferred embodiment of the present invention, the nucleic add molecule is isolated from a genomic DNA, especially from a S. pyogenes genomic DNA.

[0034] According to the present invention a vector comprising a nucleic acid molecule according to any of the present invention is provided.

[0035] In a preferred embodiment the vector is adapted for recombinant expression of the hyperimmune serum reactive antigens or fragments thereof encoded by the nucleic acid molecule according to the present invention.

[0036] The present invention also provides a host cell comprising the vector according to the present invention.

[0037] According to another aspect the present invention further provides a hyperimmune serum-reactive antigen comprising an amino acid sequence being encoded by a nucleic acid molecule according to the present invention

[0038] In a preferred embodiment the amino acid sequence (polypeptide) is selected from the group consisting of Seq ID No 151, 154-158, 160-168, 170, 172, 174-182, 184-185, 188-190, 193-196, 199-201, 203-204, 207-211, 213, 215-221, 223, 225-227, 231-232, 238, 241-244 and 246-300.

[0039] In another preferred embodiment the amino acid sequence (polypeptide) is selected from the group consisting of Seq ID No 214

[0040] In a further preferred embodiment the amino acid sequence (polypeptide) is selected from the group consisting of Seq ID No 153, 186, 197-198, 205, 212, 222, 230, 234, 245.

[0041] According to a further aspect the present invention provides fragments of hyperimmune serum-reactive antigens selected from the group consisting of peptides comprising amino add sequences of column “predicted immunogenic aa” and “location of identified immunogenic region” of Table 1; the serum reactive epitopes of Table 2, especially peptides comprising amino acids 4-44, 57-65, 67-98, 101-107, 109-125, 131-144, 146-159, 168-173, 181-186, 191-200, 206-213, 229-245, 261-269, 288-301, 304-304-317, 323-328, 350-361, 374-384, 388-407, 416-425 and 1-114 of Seq ID No 151; 5-17, 49-64, 77-82, 87-98, 118-125, 127-140, 142-150, 153-159, 191-207, 212-218, 226-270, 274-287, 297-306, 325-331, 340-347, 352-369, 377-382, 390-395 and 29-226 of Seq ID No 152; 4-16, 20-26, 32-74, 76-87, 93-108, 116-141, 148-162, 165-180, 206-219, 221-228, 230-236, 239-245, 257-268, 313-328, 330-335, 353-359, 367-375, 394-403, 414-434, 437-444, 446-453, 356-464, 478-487, 526-535, 541-552, 568-575, 577-584, 589-598, 610-618, 624-643, 653-665, 667-681, 697-718, 730-748, 755-761, 773-794, 806-821, 823-831, 837-845, 862-877, 879-889, 896-919, 924-930, 935-940, 947-955, 959-964, 969-986, 991-1002, 1012-1036, 1047-1056, 1067-1073, 1079-1085, 1088-1111, 1130-1135, 1148-1164, 1166-1173, 1185-1192, 1244-1254 and 919-929 of Seq ID No 153; 5-44, 62-74, 78-83, 99-105, 107-113, 124-134, 161-174, 176-194, 203-211, 216-237, 241-247, 253-266, 272-299, 323-349, 353-360 and 145-305 of Seq ID No 154; 15-39, 52-61, 72-81, 92-97 and 71-81 of Seq ID No 155; 13-19, 21-31, 40-108, 115-122, 125-140, 158-180, 187-203, 210-223, 235-245 and 173-186 of Seq ID No 156; 5-12, 19-27, 29-39, 59-67, 71-78, 80-88, 92-104, 107-124, 129-142, 158-168, 185-191, 218-226, 230-243, 256-267, 272-277, 283-291, 307-325, 331-334, 346-352 and 316-331 of Seq ID No 157; 6-28, 43-53, 60-76, 93-103 and 21-99 of Seq ID No 158; 10-30, 120-126, 145-151, 159-169, 174-182, 191-196, 201-206, 214-220, 222-232, 254-272, 292-307, 313-323, 332-353, 361-369, 389-369, 401-415, 428-439, 465-481, 510-517, 560-568 and 9-264 of Seq ID No 159; 5-29, 39-45, 107-128 and 1-112 of Seq ID No 160; 4-38, 42-50, 54-60, 65-71, 91-102 and 21-56 of Seq ID No 161; 4-13, 19-25, 41-51, 54-62, 68-75, 79-89, 109-122, 130-136, 172-189, 192-198, 217-224, 262-268, 270-276, 281-298, 315-324, 333-342, 353-370, 376-391 and 23-39 of Seq ID No 162; 6-41, 49-58, 62-103, 117-124, 147-166, 173-194, 204-211, 221-229, 255-261, 269-284, 288-310, 319-325, 348-380, 383-389, 402-410, 424-443, 467-479, 496-517, 535-553, 555-565, 574-581, 583-591 and 474-489 of Seq ID No 163; 8-35, 52-57, 66-73, 81-88, 108-114, 125-131, 160-167, 174-230-235, 237-249, 254-262, 278-285, 308-314, 321-326, 344-353, 358-372, 376-383, 393-411, 439-446, 453-464, 471-480, 485-492, 502-508, 523-529, 533-556, 558-563, 567-584, 589-597, 605-619, 625-645, 647-666, 671-678, 690-714, 721-728, 741-763, 766-773, 777-787, 792-802, 809-823, 849-864 and 37-241, 409-534, 582-604, 743-804 of Seq ID No 164; 4-17, 24-36, 38-44, 59-67, 72-90, 92-121, 126-149, 151-159, 161-175, 197-215, 217-227, 241-247, 257-264, 266-275, 277-284, 293-307, 315-321, 330-337, 345-350, 357-366, 385-416 and 202-337 of Seq ID No 165; 4-20, 22-46, 49-70, 80-89, 96-103, 105-119, 123-129, 153-160, 181-223, 227-233, 236-243, 248-255, 261-269, 274-279, 283-299, 305-313, 315-332, 339-344, 349-362, 365-373, 380-388, 391-397, 402-407 and 1-48 of Seq ID No 166; 18-37, 41-63, 100-106, 109-151, 153-167, 170-197, 199-207, 212-229, 232-253, 273-297 and 203-217 of Seq ID No 167; 20-26, 54-61, 80-88, 94-101, 113-119, 128-136, 138-144, 156-188, 193-201, 209-217, 221-229, 239-244, 251-257, 270-278, 281-290, 308-315, 319-332, 339-352, 370-381, 388-400, 411-417, 426-435, 468-482, 488-497, 499-506, 512-521 and 261-273 of Seq ID No 168; 6-12, 16-36, 50-56, 86-92, 115-125, 143-152, 163-172, 193-203, 235-244, 280-289, 302-315, 325-348, 370-379, 399-405, 411-417, 419-429, 441-449, 463-472, 482-490, 500-516, 536-543, 561-569, 587-594, 620-636, 647-653, 659-664, 677-685, 687-693, 713-719, 733-740, 746-754, 756-779, 792-799, 808-817, 822-828, 851-865, 902-908, 920-938, 946-952, 969-976, 988-1005, 1018-1027, 1045-1057, 1063-1069, 1071-1078, 1090-1099, 1101-1109, 1113-1127, 1130-1137, 1162-1174, 1211-1221, 1234-1242, 1261-1268, 1278-1284, 1312-1317, 1319-1326, 1345-1353, 1366-1378, 1382-1394, 1396-1413, 1415-1424, 1442-1457, 1467-1474, 1482-1490, 1492-1530, 1537-1549, 1559-1576, 1611-1616, 1624-1641 and 1-414, 443-614, 997-1392 of Seq ID No 169; 14-42, 70-75, 90-100, 158-181 and 1-164 of Seq ID No 170; 4-21, 30-36, 54-82, 89-97, 105-118, 138-147 and 126-207 of Seq ID No 171; 4-21, 31-66, 96-104, 106-113, 131-142 and 180-204 of Seq ID No 172; 5-23, 31-36, 38-55, 65-74, 79-88, 101-129, 131-154, 156-165, 183-194, 225-237, 245-261, 264-271, 279-284, 287-297, 313-319, 327-336, 343-363, 380-386 and 11-197, 204-219, 258-258-372 of Seq ID No 173; 4-20, 34-41, 71-86, 100-110, 113-124, 133-143, 150-158, 160-166, 175-182, 191-197, 213-223, 233-239, 259-278, 298-322 and 195-289 of Seq ID No 174; 4-10, 21-35, 44-52, 54-62, 67-73, 87-103, 106-135, 161-174, 177-192, 200-209, 216-223, 249-298, 304-312, 315-329 and 12-130 of Seq ID No 175; 10-27, 33-38, 48-55, 70-76, 96-107, 119-133, 141-147, 151-165, 183-190, 197-210, 228-236, 245-250, 266-272, 289-295, 297-306, 308-315, 323-352, 357-371, 381-390, 394-401, 404-415, 417-425, 427-462, 466-483, 485-496, 502-507, 520-529, 531-541, 553-570, 577-588, 591-596, 600-610, 619-632, 642-65, 671-692, 694-707 and 434-444 of Seq ID No 176; 6-14, 16-25, 36-46, 52-70, 83-111, 129-138, 140-149, 153-166, 169-181, 188-206, 212-220, 223-259, 261-269, 274-282, 286-293, 297-306, 313-319, 329-341, 343-359, 377-390, 409-415, 425-430 and 360-375 of Seq ID No 177; 4-26, 28-48, 54-62, 88-121, 147-162, 164-201, 203-237, 245-251 and 254-260 of Seq ID No 178; 12-21, 26-32, 66-72, 87-93, 98-112, 125-149, 179-203, 209-226, 233-242, 249-261, 266-271, 273-289, 293-318, 346-354, 360-371, 391-400 and 369-382 of Seq ID No 179; 11-38, 44-65, 70-87, 129-135, 140-163, 171-177, 225-232, 238-249, 258-266, 271-280, 284-291, 295-300, 329-337, 344-352, 405412, 416424, 426434, 436-455, 462-475, 478-487 and 270-312 of Seq ID No 180; 5-17, 34-45, 59-69, 82-88, 117-129, 137-142, 158-165, 180-195, 201-206, 219-226, 241-260, 269-279, 292-305, 312-321, 341-347, 362-381, 396-410, 413-432, 434-445, 447-453, 482-487, 492-499, 507-516, 546-552, 556-565, 587-604 and 486-598 of Seq ID No 181; 4-15, 17-32, 40-47, 67-78, 90-98, 101-107, 111-136, 161-171, 184-198, 208-214, 234-245, 247-254, 272-279, 288-298, 303-310, 315-320, 327-333, 338-349, 364-374 and 378-396 of Seq ID No 182; 5-27, 3349, 51-57, 74-81, 95-107, 130-137, 148-157, 173-184 and 75-235 of Seq ID No 183; 6-23, 47-53, 57-63, 75-82, 97-105, 113-122, 124-134, 142-153, 159-164, 169-179, 181-187, 192-208, 215-243, 247-257, 285-290, 303-310 and 30-51 of Seq ID No 184; 17-29, 44-52, 59-73, 77-83, 86-92, 97-110, 118-153, 156-166, 173-179, 192-209, 225-231, 234-240, 245-251, 260-268, 274-279, 297-306, 328-340, 353-360, 369-382, 384-397, 414-423, 431-436, 452-465, 492-498, 500-508, 516-552, 554-560, 568-574, 580-586, 609-617, 620-626, 641-647 and 208-219 of Seq ID No 185; 4-26, 32-45, 58-72, 111-119, 137-143, 146-159, 187-193, 221-231, 235-242, 250-273, 290-304, 311-321, 326-339, 341-347, 354-368, 397-403, 412-419, 426-432, 487-506, 580-592, 619-628, 663-685, 707-716, 743-751, 770-776, 787-792, 850-859, 866-873, 882-888, 922-931, 957-963, 975-981, 983-989, 1000-1008, 1023-1029, 1058-1064, 1089-1099, 1107-1114, 1139-1145, 1147-1156, 1217-1226, 1276-1281, 1329-1335, 1355-1366, 1382-1394, 1410-1416, 1418-1424, 1443-1451, 1461-1469, 1483-1489, 1491-1501, 1515-1522, 1538-1544, 1549-1561, 1587-1593, 1603-1613, 1625-1630, 1636-1641, 1684-1690, 1706-1723, 1765-1771, 1787-1804, 1850-1857, 1863-1894, 1897-1910, 1926-1935, 1937-1943, 1960-1983, 1991-2005, 2008-2014, 2018-2039 and 396-533, 1342-1502, 1672-1920 of Seq ID No 186; 4-25, 45-50, 53-65, 79-85, 87-92, 99-109, 126-137, 141-148, 156-183, 190-203, 212-217, 221-228, 235-242, 247-277, 287-293, 300-319, 321-330, 341-361, 378-389, 394-406, 437-449, 455-461, 472-478, 482-491, 507-522, 544-554, 576-582, 587-593, 611-621, 626-632, 649-661, 679-685, 696-704, 706-716, 726-736, 740-751, 759-766, 786-792, 797-802, 810-822, 824-832, 843-852, 863-869, 874-879, 882-905 and 1-113, 210-232, 250423, 536-564 of Seq ID No 187; 4-16, 33-39, 43-49, 54-85, 107-123, 131-147, 157-169, 177-187, 198-209, 220-230, 238-248, 277-286, 293-301, 303-315, 319-379, 383-393, 402-414, 426-432, 439-449, 470-478, 483-497, 502-535, 552-566, 571-582, 596-601, 608-620, 631-643, 651-656, 663-678, 680-699, 705-717, 724-732, 738-748, 756-763, 766-772, 776-791, 796-810, 819- 827, 829-841, 847-861, 866-871, 876-882, 887-894, 909-934, 941-947, 957-969, 986-994, 998-1028, 1033-1070, 1073-1080, 1090-1096, 1098-1132, 1134-1159, 1164-1172, 1174-1201 and 617-635 of Seq ID No 188; 7-25, 30-40, 42-64, 70-77, 85-118, 120-166, 169-199, 202-213, 222-244 and 190-203 of Seq ID No 189; 4-11, 15-53, 55-93, 95-113, 120-159, 164-200, 210-243, 250-258, 261-283, 298-319, 327-340, 356-366, 369-376, 380-386, 394-406, 409-421, 425-435, 442-454, 461-472, 480-490, 494-505, 507-514, 521-527, 533-544, 566-574 and 385-398 of Seq ID No 190; 5-36, 66-72, 120-127, 146-152, 159-168, 172-184, 205-210, 221-232, 234-243, 251-275, 295-305, 325-332, 367-373, 470-479, 482-487, 520-548, 592-600, 605-615, 627-642, 655-662, 664-698, 718-725, 734-763, 776-784, 798-809, 811-842, 845-852, 867-872, 879-888, 900-928, 933-940, 972-977, 982-1003 and 12-190, 276-283, 666-806 of Seq ID No 191; 4-38, 63-68, 100-114, 160-173, 183-192, 195-210, 212-219, 221-238, 240-256, 258-266, 274-290, 301-311, 313-319, 332-341, 357-363, 395-401, 405-410, 420-426, 435-450, 453-461, 468-475, 491-498, 510-518, 529-537, 545-552, 585-592, 602-611, 634-639, 650-664 and 30-80, 89-105, 111-151 of Seq ID No 192; 7-29, 31-39, 47-54, 63-74, 81-94, 97-117, 122-127, 146-157, 168-192, 195-204, 216-240, 251-259 and 195-203 of Seq ID No 193; 5-16, 28-34, 46-65, 79-94, 98-105, 107-113, 120-134, 147-158, 163-172, 180-186, 226-233, 237-251, 253-259, 275-285, 287-294, 302-308, 315-321, 334-344, 360-371, 399-412, 420-426 and 32-50 of Seq ID No 194; 8-20, 30-36, 71-79, 90-96, 106-117, 125-138, 141-147, 166-174 and 75-90 of Seq ID No 195; 4-13, 15-33, 43-52, 63-85, 98-114, 131-139, 146-174, 186-192, 198-206, 227-233 and 69-88 of Seq ID No 196; 4-22, 29-35, 59-68, 153-170, 213-219, 224-238, 240-246, 263-270, 285-292, 301-321, 327-346, 356-371, 389-405, 411-418, 421-427, 430-437, 450-467, 472-477, 482-487, 513-518, 531-538, 569-576, 606-614, 637-657, 662-667, 673-690, 743-753, 760-767, 770-777, 786-802 and 96-230, 361-491, 572-585 of Seq ID No 197; 4-12, 21-36, 48-55, 74-82, 121-127, 195-203, 207-228, 247-262, 269-278, 280-289 and 102-210 of Seq ID No 198; 13-20, 23-31, 38-44, 78-107, 110-118, 122-144, 151-164, 176-182, 190-198, 209-216, 219-243, 251-256, 289-304, 306-313 and 240-248 of Seq ID No 199; 5-26, 34-48, 57-77, 84-102, 116-132, 139-145, 150-162, 165-173, 176-187, 192-205, 216-221, 234-248, 250-260 and 182-198 of Seq ID No 200; 10-19, 26-44, 53-62, 69-87, 90-96, 121-127, 141-146, 148-158, 175-193, 204-259, 307-313, 334-348, 360-365, 370-401, 411-439, 441-450, 455-462, 467-472, 488-504 and 41-56 of Seq ID No 201; 5-21, 36-42, 96-116, 123-130, 138-144, 146-157, 184-201, 213-228, 252-259, 277-297, 308-313, 318-323, 327-333 and 202-217 of Seq ID No 202; 6-26, 33-51, 72-90, 97-131, 147-154, 164-171, 187-216, 231-236, 260-269, 275-283 and 1-127 of Seq ID No 203; 4-22, 24-38, 44-58, 72-88, 99-108, 110-117, 123-129, 131-137, 142-147, 167-178, 181-190, 206-214, 217-223, 271-282, 290-305, 320-327, 329-336, 343-352, 354-364, 396-402, 425-434, 451-456, 471-477, 485-491, 515-541, 544-583, 595-609, 611-626, 644-656, 660-681, 683-691, 695-718 and 297458 of Seq ID No 204; 5-43, 92-102, 107-116, 120-130, 137-144, 155-163, 169-174, 193-213 and 24-135 of Seq ID No 205; 4-25, 61-69, 73-85, 88-95, 97-109, 111-130, 135-147, 150-157, 159-179, 182-201, 206-212, 224-248, 253-260, 287-295, 314-331, 338-344, 365-376, 396-405, 413-422, 424-430, 432-449, 478-485, 487-494, 503-517, 522-536, 544-560, 564-578, 585-590, 597-613, 615-623, 629-636, 640-649, 662-671, 713-721 and 176-330 of Seq ID No 206; 31-37, 41-52, 58-79, 82-105, 133-179, 184-193, 199-205, 209-226, 256-277, 281-295, 297-314, 322-328, 331-337, 359-367, 379-395, 403-409, 417-432, 442-447, 451-460, 466-472 and 46-62, 296-341 of Seq ID No 207; 23-29, 56-63; 67-74, 96-108, 122-132, 139-146, 152-159, 167-178, 189-196, 214-231, 247-265, 274-293, 301-309, 326-332, 356-363, 378-395, 406-412, 436-442, 445-451, 465-479, 487-501, 528-555, 567-581, 583-599, 610-617, 622-629, 638-662, 681-686, 694-700, 711-716 and 667-684 of Seq ID No 208; 20-51, 53-59, 109-115, 140-154, 185-191, 201-209, 212-218, 234-243, 253-263, 277-290, 303-313, 327-337, 342-349, 374-382, 394-410, 436-442, 464-477, 486-499, 521-530, 536-550, 560-566, 569-583, 652-672, 680-686, 698-704, 718-746, 758-770, 774-788, 802-827, 835-842, 861-869 and 258-416 of Seq ID No 209; 7-25, 39-45, 59-70, 92-108, 116-127, 161-168, 202-211, 217-227, 229-239, 254-262, 271-278, 291-300 and 278-295 of Seq ID No 210; 4-20, 27-33, 45-51, 53-62, 66-74, 81-88, 98-111, 124-130, 136-144, 156-179, 183-191 and 183-195 of Seq ID No 211; 12-24, 27-33, 43-49, 55-71, 77-85, 122-131, 168-177, 179-203, 209-214, 226-241 and 63-238 of Seq ID No 212; 4-19, 37-50, 120-126, 131-137, 139-162, 177-195, 200-209, 211-218, 233-256, 260-268, 271-283, 288-308 and 1-141 of Seq ID No 213; 11-17, 40-47, 57-63, 96-124, 141-162, 170-207, 223-235, 241-265, 265, 271-277, 281-300, 312-318, 327-333, 373-379 and 231-368 of Seq ID No 214; 9-33, 41-48, 57-79, 97-103, 113-138, 146-157, 165-186, 195-201, 209-215, 223-229, 237-247, 277-286, 290-297, 328-342 and 247-260 of Seq ID No 215; 7-15, 39-45, 58-64, 79-84, 97-127, 130-141, 163-176, 195-203, 216-225, 235-247, 254-264, 271-279 and 64-72 of Seq ID No 216; 4-12, 26-42, 46-65, 73-80, 82-94, 116-125, 135-146, 167-173, 183-190, 232-271, 274-282, 300-306, 320-343, 351-362, 373-383, 385-391, 402-409, 414-426, 434-455, 460-466, 473-481, 485-503, 519-525, 533-542, 554-565, 599-624, 645-651, 675-693, 717-725, 751-758, 767-785, 792-797, 801-809, 819-825, 831-836, 859-869, 890-897 and 222-362, 756-896 of Seq ID No 217; 11-17, 22-28, 52-69, 73-83, 86-97, 123-148, 150-164, 166-177, 179-186, 188-199, 219-225, 229-243, 250-255 and 153-170 of Seq ID No 218; 4-61, 71-80, 83-90, 92-128, 133-153, 167-182, 184-192, 198-212 and 56-73 of Seq ID No 219; 4-19, 26-37, 45-52, 58-66, 71-77, 84-92, 94-101, 107-118, 120-133, 156-168, 170-179, 208-216, 228-238, 253-273, 280-296, 303-317, 326-334 and 298-312 of Seq ID No 220; 7-13, 27-35, 38-56, 85-108, 113-121, 123-160, 163-169, 172-183, 188-200, 206-211, 219-238, 247-254 and 141-157 of Seq ID No 221; 23-39, 45-73, 86-103, 107-115, 125-132, 137-146, 148-158, 160-168, 172-179, 185-192, 200-207, 210-224, 233-239, 246-255, 285-334, 338-352, 355-379, 383-389, 408-417, 423-429, 446-456, 460-473, 478-503, 522-540, 553-562, 568-577, 596-602, 620-636, 640-649, 655-663 and 433-440, 572-593 of Seq ID No 222; 4-42, 46-58, 64-76, 118-124, 130-137, 148-156, 164-169, 175-182, 187-194, 203-218, 220-227, 241-246, 254-259, 264-270, 275-289, 296-305, 309-314, 322-334, 342-354, 398-405, 419-426, 432-443, 462-475, 522-530, 552-567, 593-607, 618-634, 636-647, 653-658, 662-670, 681-695, 698-707, 709-720, 732-742, 767-792, 794-822, 828-842, 851-866, 881-890, 895-903, 928-934, 940-963, 978-986, 1003-1025, 1027-1043, 1058-1075, 1080-1087, 1095-1109, 1116-1122, 1133-1138, 1168-1174, 1179-1186, 1207-1214, 1248-1267 and 17-319, 417-563 of Seq ID No 223; 6-19, 23-33, 129-138, 140-150, 153-184, 190-198, 206-219, 235-245, 267-275, 284-289, 303-310, 322-328, 354-404, 407-413, 423-446, 453-462, 467-481, 491-500 and 46-187 of Seq ID No 224; 4-34, 39-57, 78-86, 106-116, 141-151, 156-162, 165-172, 213-237, 252-260, 262-268, 272-279, 296-307, 332-338, 397-403, 406-416, 431-446, 448-453, 464-470, 503-515, 519-525, 534-540, 551-563, 578-593, 646-668, 693-699, 703-719, 738-744, 748-759, 771-777, 807-813, 840-847, 870-876, 897-903, 910-925, 967-976, 979-992 and 21-244, 381-499, 818-959 of Seq ID No 225; 19-29, 65-75, 90-109, 111-137, 155-165, 169-175 and 118-136 of Seq ID No 226; 15-20, 30-36, 55-63, 73-79, 90-117, 120-127, 136-149, 166-188, 195-203, 211-223, 242-255, 264-269, 281-287, 325-330, 334-341, 348-366, 395-408, 423-429, 436-444, 452-465 and 147-155 of Seq ID No 227; 11-18, 21-53, 77-83, 91-98, 109-119, 142-163, 173-181, 193-208, 216-227, 238-255, 261-268, 274-286, 290-297, 308-315, 326-332, 352-359, 377-395, 399-406, 418-426, 428-438, 442-448, 458-465, 473-482, 488-499, 514-524, 543-533, 564-600, 623-632, 647-654, 660-669, 672-678, 710-723, 739-749, 787-793, 820-828, 838-860, 889-895, 901-907, 924-939, 956-962, 969-976, 991-999, 1012-1018, 1024-1029, 1035-1072, 1078-1091, 1142-1161 and 74-438 of Seq ID No 228; 4-31, 41-52, 58-63, 65-73, 83-88, 102-117, 123-130, 150-172, 177-195, 207-217, 222-235, 247-253, 295-305, 315-328, 335-342, 359-365, 389-394, 404-413 and 156-420 of Seq ID No 229; 4-42, 56-69, 98-108, 120-125, 210-216, 225-231, 276-285, 304-310, 313-318, 322-343 and 79-348 of Seq ID No 230; 12-21, 24-30, 42-50, 61-67, 69-85, 90-97, 110-143, 155-168 and 53-70 of Seq ID No 231; 4-26, 41-54, 71-78, 88-96, 116-127, 140-149, 151-158, 161-175, 190-196, 201-208, 220-226, 240-247, 266-281, 298-305, 308-318, 321-329, 344-353, 370-378, 384-405, 418-426, 429-442, 457-463, 494-505, 514-522 and 183-341 of Seq ID No 232; 4-27, 69-77, 79-101, 117-123, 126-142, 155-161, 171-186, 200-206, 213-231, 233-244, 258-263, 269-275, 315-331, 337-346, 349-372, 376-381, 401-410, 424-445, 447-455, 463-470, 478-484, 520-536, 546-555, 558-569, 580-597, 603-618, 628-638, 648-660, 668-683, 717-723, 765-771, 781-788, 792-806, 812-822 and 92-231, 618-757 of Seq ID No 233; 11-47, 63-75, 108-117, 119-128, 133-143, 171-185, 190-196, 226-232, 257-264, 278-283, 297-309, 332-338, 341-346, 351-358, 362-372 and 41-170 of Seq ID No 234; 6-26, 50-56, 83-89, 108-114, 123-131, 172-181, 194-200, 221-238, 241-259, 263-271, 284-292, 304-319, 321-335, 353-358, 384-391, 408-417, 424-430, 442-448, 459-466, 487-500, 514-528, 541-556, 572-578, 595-601, 605-613, 620-631, 634-648, 660-679, 686-693, 702-708, 716-725, 730-735, 749-755, 770-777, 805-811, 831-837, 843-851, 854-860, 863-869, 895-901, 904-914, 922-929, 933-938, 947-952, 956-963, 1000-1005, 1008-1014, 1021-1030, 1131-1137, 11541164, 1166-1174 and 20487, 757-1153 of Seq ID No 235; 10-34, 67-78, 131-146, 160-175, 189-194, 201-214, 239-250, 265-271, 296-305 and 26-74, 91-100, 105-303 of Seq ID No 236; 9-15, 19-32, 109-122, 143-150, 171-180, 186-191, 209-217, 223-229, 260-273, 302-315, 340-346, 353-359, 377-383, 389-406, 420426, 460480 and 10-223, 231-251, 264-297, 312-336 of Seq ID No 237; 5-28, 76-81, 180-195, 203-209, 211-219, 227-234, 242-252, 271-282, 317-325, 350-356, 358-364, 394-400, 405-413, 417-424, 430-436, 443-449, 462-482, 488-498, 503-509, 525-537 and 22-344 of Seq ID No 238; 5-28, 42-54, 77-83, 86-93, 98-104, 120-127, 145-159, 166-176, 181-187, 189-197, 213-218, 230-237, 263-271, 285-291, 299-305, 326-346, 368-375, 390-395 and 1-151 of Seq ID No 239; 6-34, 48-55, 58-64, 84-101, 121-127, 143-149, 153-159, 163-170, 173-181, 216-225, 227-240, 248-254, 275-290, 349-364, 375-410, 412-418, 432-438, 445-451, 465-475, 488-496, 505-515, 558-564, 571-579, 585-595, 604-613, 626-643, 652-659, 677-686, 688-696, 702-709, 731-747, 777-795, 820-828, 836-842, 845-856, 863-868, 874-882, 900-909, 926-943, 961-976, 980-986, 992-998, 1022-1034, 1044-1074, 1085-1096, 1101-1112, 1117-1123, 1130-1147, 1181-1187, 1204-1211, 1213-1223, 1226-1239, 1242-1249, 1265-1271, 1273-1293, 1300-1308, 1361-1367, 1378-1384, 1395-1406, 1420-1428, 1439-1446, 1454-1460, 1477-1487, 1509-1520, 1526-1536, 1557-1574, 1585-1596, 1605-1617, 1621-1627, 1631-1637, 1648-1654, 1675-1689, 1692-1698, 1700-1706, 1712-1719, 1743-1756 and 91-263 of Seq ID No 240; 4-16, 75-90, 101-136, 138-144, 158-164, 171-177, 191-201, 214-222, 231-241, 284-290, 297-305, 311-321, 330-339, 352-369, 378-385, 403-412, 414-422, 428-435, 457-473, 503-521, 546-554, 562-568, 571-582, 589-594, 600-608, 626-635, 652-669, 687-702, 706-712, 718-724, 748-760, 770-775 and 261-272 of Seq ID No 241; 4-19, 30-41, 46-57, 62-68, 75-92, 126-132, 149-156, 158-168, 171-184, 187-194, 210-216, 218-238, 245-253, 306-312, 323-329, 340-351, 365-373, 384-391, 399-405, 422-432, 454465, 471-481, 502-519, 530-541, 550-562, 566-572, 576-582, 593-599, 620-634, 637-643, 645-651, 657-664, 688-701 and 541-551 of Seq ID No 242; 6-11, 17-25, 53-58, 80-86, 91-99, 101-113, 123-131, 162-169, 181-188, 199-231, 245-252 and 84-254 of Seq ID No 243; 13-30, 71-120, 125-137, 139-145, 184-199 and 61-78 of Seq ID No 244; 9-30, 38-53, 63-70, 74-97, 103-150, 158-175, 183-217, 225-253, 260-268, 272-286, 290-341, 352-428, 434-450, 453-460, 469-478, 513-525, 527-534, 554-563, 586-600, 602-610, 624-640, 656-684, 707-729, 735-749, 757-763, 766-772, 779-788, 799-805, 807-815, 819-826, 831-855 and 568-580 of Seq ID No 245; 11-21, 29-38 and 5-17 of Seq ID No 246; 2-9 of Seq ID No 247; 4-10, 16-28 and 7-18, 26-34 of Seq ID No 248; 10-16 and 1-15 of Seq ID No 249; 4-11 of Seq ID No 250; 4-40, 42-51 and 37-53 of Seq ID No 251; 4-21 and 22-29 of Seq ID No 252; 2-11 Seq ID No 253; 9-17, 32-44 and 1-22 of Seq ID No 254; 19-25, 27-32 and 15-34 of Seq ID No 255; 4-12, 15-22 and 11-33 of Seq ID No 256; 10-17, 24-30, 39-46, 51-70 and 51-61 of Seq ID No 257; 6-19 of Seq ID No 258; 6-11, 21-27, 31-54 and 11-29 of Seq ID No 259; 4-10, 13-45 and 11-35 of Seq ID No 260; 4-14, 23-32 and 11-35 of Seq ID No 261; 14-39, 45-51 and 15-29 of Seq ID No 262; 4-11, 14-28 and 4-17 of Seq ID No 263; 4-16 and 2-16 and 2-16 of Seq ID No 264; 4-10, 12-19, 39-50 and 6-22 of Seq ID No 265; 2-13 of Seq ID No 266; 4-11, 22-65 and 3-19 of Seq ID No 267; 17-23, 30-35, 39-46, 57-62 and 30-49 of Seq ID No 268; 4-19 and 14-22 of Seq ID No 269; 2-9 of Seq ID No 270; 7-18, 30-43 and 4-12 of Seq ID No 271; 4-30, 39-47 and 5-22 of Seq ID No 272; 6-15 and 14-29 of Seq ID No 273; 4-34 and 23-35 of Seq ID No 274; 4-36, 44-57, 65-72 and 14-27 of Seq ID No 275; 4-18 and 11-20 of Seq ID No 276; 5-19 of Seq ID No 277; 18-36 and 6-20 of Seq ID No 278; 4-10, 19-34, 41-84, 96-104 and 50-63 of Seq ID No 279; 4-9, 19-27 and 8-21 of Seq ID No 280; 4-16, 18-28 and 22-30 of Seq ID No 281; 4-15 and 21-35 of Seq ID No 282; 4-17 and 3-13 of Seq ID No 283; 4-12 and 4-18 of Seq ID No 284; 4-24, 31-36 and 29-45 of Seq ID No 285; 12-22, 34-49 and 21-32 of Seq ID No 286; 4-17 and 22-32 of Seq ID No 287; 4-16, 25-42 and 7-28 of Seq ID No 288; 4-10 and 7-20 of Seq ID No 289; 4-11, 16-36, 39-54 and 28-44 of Seq ID No 290; 5-20, 29-54 and 14-29 of Seq ID No 291; 24-33 and 10-22 of Seq ID No 292 10-51, 54-61 and 43-64 of Seq ID No 293; 7-13 and 2-17 of Seq ID No 294; 11-20 and 6-20 of Seq ID No 295; 4-30, 34-41 and 19-28 of Seq ID No 296; 11-21 of Seq ID No 297; 4-16, 21-26 and 9-38 of Seq ID No 298; 4-12, 15-27, 30-42, 66-72 and 10-24 of Seq ID No 299; 8-17 and 11-20 of Seq ID No 300; and 2-19 of Seq ID No 246; 1-12 of Seq ID No 247; 21-38 of Seq ID No 248; 2-22 of Seq ID No 254; 15-33 of Seq ID No 255; 11-32 of Seq ID No 256; 11-28 of Seq ID No 259; 10-27 of Seq ID No 260; 9-26 of Seq ID No 261; 4-16 of Seq ID No 263; 1-18 of Seq ID No 266; 12-29 of Seq ID No 273; 6-23 of Seq ID No 276; 1-21 of Seq ID No 277; 47-64 of Seq ID No 279; 28-45 of Seq ID No 285; 18-35 of Seq ID No 287; 14-31 of Seq ID No 291; 7-24 of Seq ID No 292; 8-25 of Seq ID No 299; 1-20 of Seq ID No 300; 18-33 of Seq ID No 151; 62-72 of Seq ID No 151; 118-131 of Seq ID No 152; 195-220 of Seq ID No 154; 215-240 of Seq ID No 154;255-280 of Seq ID No 154, 72-81 of Seq ID No 155; 174-186 of Seq ID No 156; 317-331 of Seq ID No 157; 35-59 of Seq ID No 158; 54-84 of Seq ID No 158; 79-104 of Seq ID No 158; 33-58 of Seq ID No 159; 81-101 of Seq ID No 159; 136-150 of Seq ID No 159; 173-186 of Seq ID No 159; 231-251 of Seq ID No 159; 22-48 of Seq ID No 161; 24-39 of Seq ID No 162; 475-489 of Seq ID No 163; 38-56 of Seq ID No 164; 583-604 of Seq ID No 164; 202-223 of Seq ID No 165; 222-247 of Seq ID No 165; 242-267 of Seq ID No 165; 262-287 of Seq ID No 165; 282-307 of Seq ID No 165; 302-327 of Seq ID No 165; 25-48 of Seq ID No 166; 204-217 of Seq ID No 167; 259-276 of Seq ID No 168; 121-139 of Seq ID No 169; 260-267 of Seq ID No 169; 215-240 of Seq ID No 169; 115-140 of Seq ID No 170; 182-204 of Seq ID No 172; 144-153 of Seq ID No 173; 205-219 of Seq ID No 173; 196-206 of Seq ID No 174; 240-249 of Seq ID No 174; 272-287 of Seq ID No 174; 199-223 of Seq ID No 174; 218-237 of Seq ID No 174; 226-249 of Seq ID No 175; 287-306 of Seq ID No 175; 430-449 of Seq ID No 176; 361-375 of Seq ID No 177; 241-260 of Seq ID No 178; 483-502 of Seq ID No 181; 379-396 of Seq ID No 182; 31-51 of Seq ID No 184; 1436-1460 of Seq ID No 186; 1455-1474 of Seq ID No 186; 1469-1487 of Seq ID No 186; 215-229 of Seq ID No 187; 534-561 of Seq ID No 187; 59-84 of Seq ID No 187; 79-104 of Seq ID No 187; 618-635 of Seq ID No 188; 191-203 of Seq ID No 189; 386-398 of Seq ID No 190; 65-83 of Seq ID No 191; 90-105 of Seq ID No 192; 112-136 of Seq ID No 192; 290-209 of Seq ID No 193; 33-50 of Seq ID No 194; 76-90 of Seq ID No 195; 70-88 of Seq ID No 196; 418-442 of Seq ID No 197; 574-585 of Seq ID No 197; 87-104 of Seq ID No 198; 124-148 of Seq ID No 198; 141-152 of Seq ID No 198; 241-248 of Seq ID No 199; 183-198 of Seq ID No 200; 40-57 of Seq ID No 201; 202-217 of Seq ID No 202; 50-74 of Seq ID No 203; 69-93 of Seq ID No 203; 88-112 of Seq ID No 203; 107-127 of Seq ID No 203; 74-92 of Seq ID No 205; 207-232 of Seq ID No 206; 227-252 of Seq ID No 206; 247-272 of Seq ID No 206; 47-60 of Seq ID No 207; 297-305 of Seq ID No 207; 312-337 of Seq ID No 207; 667-384 of Seq ID No 208; 279-295 of Seq ID No 210; 179-198 of Seq ID No 211; 27-51 of Seq ID No 213; 46-70 of Seq ID No 213; 65-89 of Seq ID No 213; 84-108 of Seq ID No 213; 112-141 of Seq ID No 213; 248-260 of Seq ID No 215; 59-78 of Seq ID No 216; 154-170 of Seq ID No 218; 57-73 of Seq ID No 219; 297-314 of Seq ID No 220; 142-157 of Seq ID No 221; 428-447 of Seq ID No 222; 573-593 of Seq ID No 222; 523-544 of Seq ID No 223; 46-70 of Seq ID No 223; 65-89 of Seq ID No 223; 84-108 of Seq ID No 223; 122-151 of Seq ID No 223; 123-142 of Seq ID No 224; 903-921 of Seq ID No 225; 119-136 of Seq ID No 226; 142-161 of Seq ID No 227; 258-277 of Seq ID No 228; 272-300 of Seq ID No 228; 295-322 of Seq ID No 228; 311-343 of Seq ID No 229; 278-304 of Seq ID No 229; 131-150 of Seq ID No 230; 195-218 of Seq ID No 230; 53-70 of Seq ID No 231; 184-208 of Seq ID No 232; 222-246 of Seq ID No 232; 241-265 of Seq ID No 232; 260-284 of Seq ID No 232; 279-303 of Seq ID No 232; 317-341 of Seq ID No 232; 678-696 of Seq ID No 233; 88-114 of Seq ID No 235; 464-481 of Seq ID No 235; 153-172 of Seq ID No 236; 137-155, 166-184 of Seq ID No 236; 215-228 of Seq ID No 236; 37-51 of Seq ID No 237; 53-75 of Seq ID No 237; 232-251 of Seq ID No 237; 318-336 of Seq ID No 237; 305-315 of Seq ID No 238; 131-156 of Seq ID No 238; 258-275 of Seq ID No 241; 107-137 of Seq ID No 243; 138-162 of Seq ID No 243; 157-181 of Seq ID No 243; 195-227 of Seq ID No 243; 62-78 of Seq ID No 244; 567-584 of Seq ID No 245.

[0042] The present invention also provides a process for producing a S. pyogenes hyperimmune serum reactive antigen or a fragment thereof according to the present invention comprising expressing one or more of the nucleic acid molecules according to the present invention in a suitable expression system.

[0043] Moreover, the present invention provides a process for producing a cell, which expresses a S. pyogenes hyperimmune serum reactive antigen or a fragment thereof according to the present invention comprising transforming or transfecting a suitable host cell with the vector according to the present invention.

[0044] According to the present invention a pharmaceutical composition, especially a vaccine, comprising a hyperimmune serum-reactive antigen or a fragment thereof as defined in the present invention or a nucleic add molecule as defined in the present invention is provided.

[0045] In a preferred embodiment the pharmaceutical composition further comprises an immunostimulatory substance, preferably selected from the group comprising polycationic polymers, especially polycationic peptides, immunostimulatory deoxynucleotides (ODNs), peptides containing at least two LysLeuLys motifs, especially KLKL5KLK, neuroactive compounds, especially human growth hormone, alumn, Freund's complete or incomplete adjuvants or combinations thereof.

[0046] In a more preferred embodiment the immunostimulatory substance is a combination of either a polycationic polymer and immunostimulatory deoxynucleotides or of a peptide containing at least two LysLeuLys motifs and immunostimulatory deoxynucleotides.

[0047] In a still more preferred embodiment the polycationic polymer is a polycationic peptide, especially polyarginine.

[0048] According to the present invention the use of a nucleic acid molecule according to the present invention or a hyperimmune serum-reactive antigen or fragment thereof according to the present invention for the manufacture of a pharmaceutical preparation, especially for the manufacture of a vaccine against S. pyogenes infection, is provided.

[0049] Also an antibody, or at least an effective part thereof, which binds at least to a selective part of the hyperimmune serum-reactive antigen or a fragment thereof according to the present invention is provided herewith.

[0050] In a preferred embodiment the antibody is a monoclonal antibody.

[0051] In another preferred embodiment the effective part of the antibody comprises Fab fragments.

[0052] In a further preferred embodiment the antibody is a chimeric antibody.

[0053] In a still preferred embodiment the antibody is a humanized antibody.

[0054] The present invention also provides a hybridoma cell line, which produces an antibody according to the present invention.

[0055] Moreover, the present invention provides a method for producing an antibody according to the present invention, characterized by the following steps:
[0056] initiating an immune response in a non-human animal by administrating an hyperimmune serum-reactive antigen or a fragment thereof, as defined in the invention, to said animal,
[0057] removing an antibody containing body fluid from said animal, and
[0058] producing the antibody by subjecting said antibody containing body fluid to further purification steps.

[0059] Accordingly, the present invention also provides a method for producing an antibody according to the present invention, characterized by the following steps:
[0060] initiating an immune response in a non-human animal by administrating an hyperimmune serum-reactive antigen or a fragment thereof, as defined in the present invention, to said animal,
[0061] removing the spleen or spleen cells from said animal,
[0062] producing hybridoma cells of said spleen or spleen cells,
[0063] selecting and cloning hybridoma cells specific for said hyperimmune serum-reactive antigens or a fragment thereof,
[0064] producing the antibody by cultivation of said cloned hybridoma cells and optionally further purification steps.

[0065] The antibodies provided or produced according to the above methods may be used for the preparation of a medicament for treating or preventing S. pyogenes infections.

[0066] According to another aspect the present invention provides an antagonist which binds to a hyperimmune serum-reactive antigen or a fragment thereof according to the present invention.

[0067] Such an antagonist capable of binding to a hyperimmune serum-reactive antigen or fragment thereof according to the present invention may be identified by a method comprising the following steps:
[0068] a) contacting an isolated or immobilized hyperimmune serum-reactive antigen or a fragment thereof according to the present invention with a candidate antagonist under conditions to permit binding of said candidate antagonist to said hyperimmune serum-reactive antigen or fragment, in the presence of a component capable of providing a detectable signal in response to the binding of the candidate antagonist to said hyperimmune serum reactive antigen or fragment thereof; and
[0069] b) detecting the presence or absence of a signal generated in response to the binding of the antagonist to the hyperimmune serum reactive antigen or the fragment thereof.

[0070] An antagonist capable of reducing or inhibiting the interaction activity of a hyperimmune serum-reactive antigen or a fragment thereof according to the present invention to its interaction partner may be identified by a method comprising the following steps:
[0071] a) providing a hyperimmune serum reactive antigen or a hyperimmune fragment thereof according to the present invention,
[0072] b) providing an interaction partner to said hyperimmune serum reactive antigen or a fragment thereof, especially an antibody according to the present invention,
[0073] c) allowing interaction of said hyperimmune serum reactive antigen or fragment thereof to said interaction partner to form a interaction complex,
[0074] d) providing a candidate antagonist,
[0075] e) allowing a competition reaction to occur between the candidate antagonist and the interaction complex,
[0076] f) determining whether the candidate antagonist inhibits or reduces the interaction activities of the hyperimmune serum reactive antigen or the fragment thereof with the interaction partner.

[0077] The hyperimmune serum reactive antigens or fragments thereof according to the present invention may be used for the isolation and/or purification and/or identification of an interaction partner of said hyperimmune serum reactive antigen or fragment thereof.

[0078] The present invention also provides a process for in vitro diagnosing a disease related to expression of a hyperimmune serum-reactive antigen or a fragment thereof according to the present invention comprising determining the presence of a nucleic acid sequence encoding said hyperimmune serum reactive antigen and fragment according to the present invention or the presence of the hyperimmune serum reactive antigen or fragment thereof according to the present invention.

[0079] The present invention also provides a process for in vitro diagnosis of a bacterial infection, especially a S. pyogenes infection, comprising analyzing for the presence of a nucleic acid sequence encoding said hyperimmune serum reactive antigen and fragment according to the present invention or the presence of the hyperimmune serum reactive antigen or fragment thereof according to the present invention.

[0080] Moreover, the present invention provides the use of a hyperimmune serum reactive antigen or fragment thereof according to the present invention for the generation of a peptide binding to said hyperimmune serum reactive antigen or fragment thereof, wherein the peptide is an anticaline.

[0081] The present invention also provides the use of a hyperimmune serum-reactive antigen or fragment thereof according to the present invention for the manufacture of a functional nucleic acid, wherein the functional nucleic acid is selected from the group comprising aptamers and spiegelmers.

[0082] The nucleic acid molecule according to the present invention may also be used for the manufacture of a functional ribonucleic acid, wherein the functional ribonucleic acid is selected from the group comprising ribozymes, antisense nucleic acids and siRNA.

[0083] The present invention advantageously provides an efficient, relevant and comprehensive set of isolated nucleic acid molecules and their encoded hyperimmune serum reactive antigens and fragments thereof identified from S. pyogenes using an antibody preparation from multiple human plasma pools and surface expression libraries derived from the genome of S. pyogenes. Thus, the present invention fulfills a widely felt demand for S. pyogenes antigens, vaccines, diagnostics and products useful in procedures for preparing antibodies and for identifying compounds effective against S. pyogenes infection. An effective vaccine should be composed of proteins or polypeptides, which are expressed by all strains and are able to induce high affinity, abundant antibodies against cell surface components of S. pyogenes. The antibodies should be IgG1 and/or IgG3 for opsonization, and any IgG subtype and IgA for neutralisation of adherence and toxin action. A chemically defined vaccine must be definitely superior compared to a whole cell vaccine (attenuated or killed), since components of S. pyogenes, which cross-react with human tissues or inhibit opsonization {Whitnack, E. et al., 1985) can be eliminated, and the individual proteins inducing protective antibodies and/or a protective immune response can be selected.

[0084] The approach, which has been employed for the present invention, is based on the interaction of group A streptococcal proteins or peptides with the antibodies present in human sera. The antibodies produced against S. pyogenes by the human immune system and present in human sera are indicative of the in vivo expression of the antigenic proteins and their immunogenicity. In addition, the antigenic proteins as identified by the bacterial surface display expression libraries using pools of pre-selected sera, are processed in a second and third round of screening by individual selected or generated sera. Thus the present invention supplies an efficient, relevant, comprehensive set of group A streptococcal antigens as a pharmaceutical composition, especially a vaccine preventing infection by S. pyogenes.

[0085] In the antigen identification program for identifying a comprehensive set of antigens according to the present invention, at least two different bacterial surface expression libraries are screened with several serum pools or plasma fractions or other pooled antibody containing body fluids (antibody pools). The antibody pools are derived from a serum collection, which has been tested against antigenic compounds of S. pyogenes, such as whole cell extracts and culture supernatant proteins. Preferably, 2 distinct serum collections are used: 1. With very stable antibody repertoire: normal adults, clinically healthy people, who are non-carriers and overcame previous encounters or currently carriers of S. pyogenes without acute disease and symptoms, 2. With antibodies induced acutely by the presence of the pathogenic organism: patients with acute disease with different manifestations (e.g. S. pyogenes pharyngitis, wound infection and bacteraemia). Sera have to react with multiple group A streptococci-specific antigens in order to be considered hyperimmune and therefore relevant in the screening method applied for the present invention. The antibodies produced against streptococci by the human immune system and present in human sera are indicative of the in vivo expression of the antigenic proteins and their immunogenicity.

[0086] The expression libraries as used in the present invention should allow expression of all potential antigens, e.g. derived from all surface proteins of S. pyogenes. Bacterial surface display libraries will be represented by a recombinant library of a bacterial host displaying a (total) set of expressed peptide sequences of group A streptococci on a number of selected outer membrane proteins (LamB, BtuB, FhuA) at the bacterial host membrane {Georgiou, G., 1997; Etz, H. et al., 2001}. One of the advantages of using recombinant expression libraries is that the identified hyperimmune serum-reactive antigens may be instantly produced by expression of the coding sequences of the screened and selected clones expressing the hyperimmune serum-reactive antigens without further recombinant DNA technology or cloning steps necessary.

[0087] The comprehensive set of antigens identified by the described program according to the present invention is analysed further by one or more additional rounds of screening. Therefore individual antibody preparations or antibodies generated against selected peptides which were identified as immunogenic are used. According to a preferred embodiment the individual antibody preparations for the second round of screening are derived from patients who have suffered from an acute infection with group A streptococci, especially from patients who show an antibody titer above a certain minimum level, for example an antibody titer being higher than 80 percentile, preferably higher than 90 percentile, especially higher than 95 percentile of the human (patient or healthy individual) sera tested. Using such high titer individual antibody preparations in the second screening round allows a very selective identification of the hyperimmune serum-reactive antigens and fragments thereof from S. pyogenes.

[0088] Following the high throughput screening procedure, the selected antigenic proteins, expressed as recombinant proteins or in vitro translated products, in case it can not be expressed in prokaryotic expression systems, or the identified antigenic peptides (produced synthetically) are tested in a second screening by a series of ELISA and Western blotting assays for the assessment of their immunogenicity with a large human serum collection (>100 uninfected, >50 patients sera).

[0089] It is important that the individual antibody preparations (which may also be the selected serum) allow a selective identification of the hyperimmune serum-reactive antigens from all the promising candidates from the first round. Therefore, preferably at least 10 individual antibody preparations (i.e. antibody preparations (e.g. sera) from at least 10 different individuals having suffered from an infection to the chosen pathogen) should be used in identifying these antigens in the second screening round. Of course, it is possible to use also less than 10 individual preparations, however, selectivity of the step may not be optimal with a low number of individual antibody preparations. On the other hand, if a given hyperimmune serum-reactive antigen (or an antigenic fragment thereof) is recognized by at least 10 individual antibody preparations, preferably at least 30, especially at least 50 individual antibody preparations, identification of the hyperimmune serum-reactive antigen is also selective enough for a proper identification. Hyperimmune serum-reactivity may of course be tested with as many individual preparations as possible (e.g. with more than 100 or even with more than 1,000).

[0090] Therefore, the relevant portion of the hyperimmune serum-reactive antibody preparations according to the method of the present invention should preferably be at least 10, more preferred at least 30, especially at least 50 individual antibody preparations. Alternatively (or in combination) hyperimmune serum-reactive antigens may preferably be also identified with at least 20%, preferably at least 30%, especially at least 40% of all individual antibody preparations used in the second screening round.

[0091] According to a preferred embodiment of the present invention, the sera from which the individual antibody preparations for the second round of screening are prepared (or which are used as antibody preparations), are selected by their titer against S. pyogenes (e.g. against a preparation of this pathogen, such as a lysate, cell wall components and recombinant proteins). Preferably, some are selected with a total IgA titer above 4,000 U, especially above 6,000 U, and/or an IgG titer above 10,000 U, especially above 12,000 U (U=units, calculated from the OD405 nm reading at a given dilution) when the whole organism (total lysate or whole cells) is used as antigen in the ELISA.

[0092] The antibodies produced against streptococci by the human immune system and present in human sera are indicative of the in vivo expression of the antigenic proteins and their immunogenicity. The recognition of linear epitopes by antibodies can be based on sequences as short as 4-5 amino acids. Of course it does not necessarily mean that these short peptides are capable of inducing the given antibody in vivo. For that reason the defined epitopes, polypeptides and proteins are further to be tested in animals (mainly in mice) for their capacity to induce antibodies against the selected proteins in vivo.

[0093] The preferred antigens are located on the cell surface or secreted, and are therefore accessible extracellularly. Antibodies against cell wall proteins are expected to serve two purposes: to inhibit adhesion and to promote phagocytosis. Antibodies against secreted proteins are beneficial in neutralisation of their function as toxin or virulence component. It is also known that bacteria communicate with each other through secreted proteins. Neutralizing antibodies against these proteins will interrupt growth-promoting cross-talk between or within streptococcal species. Bioinformatic analyses (signal sequences, cell wall localisation signals, transmembrane domains) proved to be very useful in assessing cell surface localisation or secretion. The experimental approach includes the isolation of antibodies with the corresponding epitopes and proteins from human serum, and the generation of immune sera in mice against (poly)peptides selected by the bacterial surface display screens. These sera are then used in a third round of screening as reagents in the following assays: cell surface staining of group A streptococci grown under different conditions (FACS, microscopy), determination of neutralizing capacity (toxin, adherence), and promotion of opsonization and phagocytosis (in vitro phagocytosis assay).

[0094] For that purpose, bacterial E. coli clones are directly injected into mice and immune sera taken and tested in the relevant in vitro assay for functional opsonic or neutralizing antibodies. Alternatively, specific antibodies may be purified from human or mouse sera using peptides or proteins as substrate.

[0095] Host defence against S. pyogenes relies mainly on innate immunological mechanisms. Inducing high affinity antibodies of the opsonic and neutralizing type by vaccination helps the innate immune system to eliminate bacteria and toxins. This makes the method according to the present invention an optimal tool for the identification of group A streptococcal antigenic proteins.

[0096] The skin and mucous membranes are formidable barriers against invasion by streptococci. However, once the skin or the mucous membranes are breached the first line of non-adaptive cellular defence begins its co-ordinate action through complement and phagocytes, especially the polymorphonuclear leukocytes (PMNs). These cells can be regarded as the cornerstones in eliminating invading bacteria. As group A streptococci are primarily extracellular pathogens, the major anti-streptococcal adaptive response comes from the humoral arm of the immune system, and is mediated through three major mechanisms: promotion of opsonization, toxin neutralisation, and inhibition of adherence. It is believed that opsonization is especially important, because of its requirement for an effective phagocytosis. For efficient opsonization the microbial surface has to be coated with antibodies and complement factors for recognition by PMNs through receptors to the Fc fragment of the IgG molecule or to activated C3b. After opsonization, streptococci are phagocytosed and killed. Antibodies bound to specific antigens on the cell surface of bacteria serve as ligands for the attachment to PMNs and to promote phagocytosis. The very same antibodies bound to the adhesins and other cell surface proteins are expected to neutralize adhesion and prevent colonization. The selection of antigens as provided by the present invention is thus well suited to identify those that will lead to protection against infection in an animal model or in humans.

[0097] According to the antigen identification method used herein, the present invention can surprisingly provide a set of comprehensive novel nucleic acids and novel hyperimmune serum reactive antigens and fragments thereof of S. pyogenes, among other things, as described below. According to one aspect, the invention particularly relates to the nucleotide sequences encoding hyperimmune serum reactive antigens which sequences are set forth in the Sequence listing Seq ID No: 1-150 and the corresponding encoded amino acid sequences representing hyperimmune serum reactive antigens are set forth in the Sequence Listing Seq ID No 151-300.

[0098] In a preferred embodiment of the present invention, a nucleic acid molecule is provided which exhibit 70% identity over their entire length to a nucleotide sequence set forth with Seq ID No 1, 48, 10-18, 20, 22, 24-32, 34-35, 38-40, 43-46, 49-51, 53-54, 57-61, 63, 65-71, 73, 75-77, 81-82, 88, 91-94 and 96-150. Most highly preferred are nucleic acids that comprise a region that is at least 80% or at least 85% identical over their entire length to a nucleic acid molecule set forth with Seq ID No 1, 4-8, 10-18,20,22, 24-32, 34-35, 38-40, 43-46, 49-51, 53-54, 57-61, 63, 65-71, 73, 75-77, 81-82, 88, 91-94 and 96-150. In this regard, nucleic acid molecules at least 90%/o, 91%, 92%, 93%, 94%, 95%, or 96% identical over their entire length to the same are particularly preferred. Furthermore, those with at least 97% are highly preferred, those with at least 98% and at least 99% are particularly highly preferred, with at least 99% or 99.5% being the more preferred, with 100% identity being especially preferred. Moreover, preferred embodiments in this respect are nucleic adds which encode hyperimmune serum reactive antigens or fragments thereof (polypeptides) which retain substantially the same biological function or activity as the mature polypeptide encoded by said nucleic adds set forth in the Seq ID No 1, 4-8, 10-18, 20, 22, 24-32, 34-35, 38-40, 43-46, 49-51, 53-54, 57-61, 63, 65-71, 73, 75-77, 81-82, 88, 91-94 and 96-150.

[0099] Identity, as known in the art and used herein, is the relationship between two or more polypeptide sequences or two or more polynucleotide sequences, as determined by comparing the sequences. In the art, identity also means the degree of sequence relatedness between polypeptide or polynucleotide sequences, as the case may be, as determined by the match between strings of such sequences. Identity can be readily calculated. While there exist a number of methods to measure identity between two polynucleotide or two polypeptide sequences, the term is well known to skilled artisans (e.g. Sequence Analysis in Molecular Biology, von Heinje, G., Academic Press, 1987). Preferred methods to determine identity are designed to give the largest match between the sequences tested. Methods to determine identity are codified in computer programs. Preferred computer program methods to determine identity between two sequences include, but are not limited to, GCG program package {Devereux, J. et al., 1984}, BLASTP, BLASTN, and FASTA {Altschul, S. et al., 1990}.

[0100] According to another aspect of the invention, nucleic acid molecules are provided which exhibit at least 96% identity to the nucleic acid sequence set forth with Seq ID No 64.

[0101] According to a further aspect of the present invention, nucleic acid molecules are provided which are identical to the nucleic add sequences set forth with Seq ID No 3, 36, 47-48, 55, 62, 72, 80, 84, 95.

[0102] The nucleic add molecules according to the present invention can as a second alternative also be a nucleic acid molecule which is at least essentially complementary to the nucleic acid described as the first alternative above. As used herein complementary means that a nucleic acid strand is base pairing via Watson-Crick base pairing with a second nucleic acid strand. Essentially complementary as used herein means that the base pairing is not occurring for all of the bases of the respective strands but leaves a certain number or percentage of the bases unpaired or wrongly paired. The percentage of correctly pairing bases is preferably at least 70 %, more preferably 80 %, even more preferably 90 % and most preferably any percentage higher than 90 %. It is to be noted that a percentage of 70 % matching bases is considered as homology and the hybridization having this extent of matching base pairs is considered as stringent. Hybridization conditions for this kind of stringent hybridization may be taken from Current Protocols in Molecular Biology Cohn Wiley and Sons, Inc., 1987). More particularly, the hybridization conditions can be as follows:
[0103] Hybridization performed e.g. in 5× SSPE, 5× Denhardt's reagent, 0.1% SDS, 100 g/mL sheared DNA at 68° C.
[0104] Moderate stringency wash in 0.2×SSC, 0.1% SDS at 42° C.
[0105] High stringency wash in 0.1×SSC, 0.1% SDS at 68° C.

[0106] Genomic DNA with a GC content of 50% has an approximate T_{M} of 96° C. For 1% mismatch, the T_{M} is reduced by approximately 1° C.

[0107] In addition, any of the further hybridization conditions described herein are in principle applicable as well.

[0108] Of course, all nucleic acid sequence molecules which encode for the same polypeptide molecule as those identified by the present invention are encompassed by any disclosure of a given coding sequence, since the degeneracy of the genetic code is directly applicable to unambiguously determine all possible nucleic acid molecules which encode a given polypeptide molecule, even if the number of such degenerated nucleic acid molecules may be high. This is also applicable for fragments of a given polypeptide, as long as the fragments encode for a polypeptide being suitable to be used in a vaccination connection, e.g. as an active or passive vaccine.

[0109] The nucleic acid molecule according to the present invention can as a third alternative also be a nucleic acid which comprises a stretch of at least 15 bases of the nucleic acid molecule according to the first and second alternative of the nucleic acid molecules according to the present invention as outlined above. Preferably, the bases form a contiguous stretch of bases. However, it is also within the scope of the present invention that the stretch consists of two or more moieties which are separated by a number of bases.

[0110] The nucleic acid molecule according to the present invention can as a fourth alternative also be a nucleic acid molecule which anneals under stringent hybridisation conditions to any of the nucleic acids of the present invention according to the above outlined first, second, and third alternative. Stringent hybridisation conditions are typically those described herein.

[0111] Finally, the nucleic acid molecule according to the present invention can as a fifth alternative also be a nucleic acid molecule which, but for the degeneracy of the genetic code, would hybridise to any of the nucleic acid molecules according to any nucleic acid molecule of the present invention according to the first, second, third, and fourth alternative as outlined above. This kind of nucleic acid molecule refers to the fact that preferably the nucleic acids according to the present invention code for the hyperimmune serum reactive antigens or fragments thereof according to the present invention. This kind of nucleic acid molecule is particularly useful in the detection of a nucleic add molecule according to the present invention and thus the diagnosis of the respective microorganisms such as S. pyogenes and any disease or diseased condition where this kind of microorganims is involved. Preferably, the hybridisation would occur or be preformed under stringent conditions as described in connection with the fourth alternative described above.

[0112] Nucleic acid molecule as used herein generally refers to any ribonucleic acid molecule or deoxyribonucleic acid molecule, which may be unmodified RNA or DNA or modified RNA or DNA. Thus, for instance, nucleic acid molecule as used herein refers to, among other, single-and double-stranded DNA, DNA that is a mixture of single- and double-stranded RNA, and RNA that is a mixture of single- and double-stranded regions, hybrid molecules comprising DNA and RNA that may be single-stranded or, more typically, double-stranded, or triple-stranded, or a mixture of single- and double-stranded regions. In addition, nucleic acid molecule as used herein refers to triple-stranded regions comprising RNA or DNA or both RNA and DNA. The strands in such regions may be from the same molecule or from different molecules. The regions may include all of one or more of the molecules, but more typically involve only a region of some of the molecules. One of the molecules of a triple-helical region often is an oligonucleotide. As used herein, the term nucleic acid molecule includes DNAs or RNAs as described above that contain one or more modified bases. Thus, DNAs or RNAs with backbones modified for stability or for other reasons are “nucleic acid molecule” as that term is intended herein. Moreover, DNAs or RNAs comprising unusual bases, such as inosine, or modified bases, such as tritylated bases, to name just two examples, are nucleic acid molecule as the term is used herein. It will be appreciated that a great variety of modifications have been made to DNA and RNA that serve many useful purposes known to those of skill in the art. The term nucleic acid molecule as it is employed herein embraces such chemically, enzymatically or metabolically modified forms of nucleic acid molecule, as well as the chemical forms of DNA and RNA characteristic of viruses and cells, including simple and complex cells, inter alia. The term nucleic acid molecule also embraces short nucleic acid molecules often referred to as oligonucleotide(s). “Polynucleotide” and “nucleic acid” or “nucleic acid molecule” are often used interchangeably herein.

[0113] Nucleic acid molecules provided in the present invention also encompass numerous unique fragments, both longer and shorter than the nucleic acid molecule sequences set forth in the sequencing listing of the S. pyogenes coding regions, which can be generated by standard cloning methods. To be unique, a fragment must be of sufficient size to distinguish it from other known nucleic acid sequences, most readily determined by comparing any selected S. pyogenes fragment to the nucleotide sequences in computer databases such as GenBank.

[0114] Additionally, modifications can be made to the nucleic acid molecules and polypeptides that are encompassed by the present invention. For example, nucleotide substitutions can be made which do not affect the polypeptide encoded by the nucleic acid, and thus any nucleic acid molecule which encodes a hyperimmune serum reactive antigen or fragments thereof is encompassed by the present invention.

[0115] Furthermore, any of the nucleic acid molecules encoding hyperimmune serum reactive antigens or fragments thereof provided by the present invention can be functionally linked, using standard techniques such as standard cloning techniques, to any desired regulatory sequences, whether a S. pyogenes regulatory sequence or a heterologous regulatory sequence, heterologous leader sequence, heterologous marker sequence or a heterologous coding sequence to create a fusion protein.

[0116] Nucleic acid molecules of the present invention may be in the form of RNA, such as mRNA or cRNA, or in the form of DNA, including, for instance, cDNA and genomic DNA obtained by cloning or produced by chemical synthetic techniques or by a combination thereof. The DNA may be triple-stranded, double-stranded or single-stranded. Single-stranded DNA may be the coding strand, also known as the sense strand, or it may be the non-coding strand, also referred to as the anti-sense strand.

[0117] The present invention further relates to variants of the herein above described nucleic acid molecules which encode fragments, analogs and derivatives of the hyperimmune serum reactive antigens and fragments thereof having a deducted S. pyogenes amino acid sequence set forth in the Sequence Listing. A variant of the nucleic acid molecule may be a naturally occurring variant such as a naturally occurring allelic variant, or it may be a variant that is not known to occur naturally. Such non-naturally occurring variants of the nucleic acid molecule may be made by mutagenesis techniques, including those applied to nucleic acid molecules, cells or organisms.

[0118] Among variants in this regard are variants that differ from the aforementioned nucleic acid molecules by nucleotide substitutions, deletions or additions. The substitutions, deletions or additions may involve one or more nucleotides. The variants may be altered in coding or non-coding regions or both. Alterations in the coding regions may produce conservative or non-conservative amino acid substitutions, deletions or additions. Preferred are nucleic acid molecules encoding a variant, analog, derivative or fragment, or a variant, analogue or derivative of a fragment, which have a S. pyogenes sequence as set forth in the Sequence Listing, in which several, a few, 5 to 10, 1 to 5, 1 to 3, 2, 1 or no amino acid(s) is substituted, deleted or added, in any combination. Especially preferred among these are silent substitutions, additions and deletions, which do not alter the properties and activities of the S. pyogenes polypeptides set forth in the Sequence Listing. Also especially preferred in this regard are conservative substitutions.

[0119] The peptides and fragments according to the present invention also include modified epitopes wherein preferably one or two of the amino acids of a given epitope are modified or replaced according to the rules disclosed in e.g. {Tourdot, S. et al., 2000}, as well as the nucleic acid sequences encoding such modified epitopes.

[0120] It is dear that also epitopes derived from the present epitopes by amino add exchanges improving, conserving or at least not significantly impeding the T cell activating capability of the epitopes are covered by the epitopes according to the present invention. Therefore the present epitopes also cover epitopes, which do not contain the original sequence as derived from S. pyogenes, but trigger the same or preferably an improved T cell response. These epitope are referred to as “heteroclitic”; they need to have a similar or preferably greater affinity to MHC/HLA molecules, and the need the ability to stimulate the T cell receptors (TCR) directed to the original epitope in a similar or preferably stronger manner.

[0121] Heteroclitic epitopes can be obtained by rational design i.e. taking into account the contribution of individual residues to binding to MHC/HLA as for instance described by {Rammensee, H. et al., 1999}, combined with a systematic exchange of residues potentially interacting with the TCR and testing the resulting sequences with T cells directed against the original epitope. Such a design is possible for a skilled man in the art without much experimentation.

[0122] Another possibility includes the screening of peptide libraries with T cells directed against the original epitope. A preferred way is the positional scanning of synthetic peptide libraries. Such approaches have been described in detail for instance by {Hemmer, B. et al., 1999} and the references given therein.

[0123] As an alternative to epitopes represented by the present derived amino add sequences or heteroclitic epitopes, also substances mimicking these epitopes e.g. “peptidemimetica” or “retro-inverso-peptides” can be applied.

[0124] Another aspect of the design of improved epitopes is their formulation or modification with substances increasing their capacity to stimulate T cells. These include T helper cell epitopes, lipids or liposomes or preferred modifications as described in WO 01/78767.

[0125] Another way to increase the T cell stimulating capacity of epitopes is their formulation with immune stimulating substances for instance cytokines or chemokines like interleukin-2, -7, -12, -18, class I and II interferons (IFN), especially IFN-gamma, GM-CSF, TNF-alpha, fit3-ligand and others.

[0126] As discussed additionally herein regarding nucleic acid molecule assays of the invention, for instance, nucleic add molecules of the invention as discussed above, may be used as a hybridization probe for RNA, cDNA and genomic DNA to isolate full-length cDNAs and genomic clones encoding polypeptides of the present invention and to isolate cDNA and genomic clones of other genes that have a high sequence similarity to the nucleic add molecules of the present invention. Such probes generally will comprise at least 15 bases. Preferably, such probes will have at least 20, at least 25 or at least 30 bases, and may have at least 50 bases. Particularly preferred probes will have at least 30 bases, and will have 50 bases or less, such as 30, 35, 40, 45, or 50 bases.

[0127] For example, the coding region of a nucleic acid molecule of the present invention may be isolated by screening a relevant library using the known DNA sequence to synthesize an oligonucleotide probe. A labeled oligonucleotide having a sequence complementary to that of a gene of the present invention is then used to screen a library of cDNA, genomic DNA or mRNA to determine to which members of the library the probe hybridizes.

[0128] The nucleic acid molecules and polypeptides of the present invention may be employed as reagents and materials for development of treatments of and diagnostics for disease, particularly human disease, as further discussed herein relating to nucleic add molecule assays, inter alia.

[0129] The nucleic acid molecules of the present invention that are oligonucleotides can be used in the processes herein as described, but preferably for PCR, to determine whether or not the S. pyogenes genes identified herein in whole or in part are present and/or transcribed in infected tissue such as blood. It is recognized that such sequences will also have utility in diagnosis of the stage of infection and type of infection the pathogen has attained. For this and other purposes the arrays comprising at least one of the nucleic adds according to the present invention as described herein, may be used.

[0130] The nucleic acid molecules according to the present invention may be used for the detection of nucleic acid molecules and organisms or samples containing these nucleic acids. Preferably such detection is for diagnosis, more preferable for the diagnosis of a disease related or linked to the present or abundance of S. pyogenes.

[0131] Eukaryotes (herein also “individual(s)”), particularly mammals, and especially humans, infected with S. pyogenes may be detected at the DNA level by a variety of techniques. Preferred candidates for distinguishing a S. pyogenes from other organisms can be obtained.

[0132] The invention provides a process for diagnosing disease, arising from infection with S. pyogenes, comprising determining from a sample isolated or derived from an individual an increased level of expression of a nucleic acid molecule having the sequence of a nucleic acid molecule set forth in the Sequence Listing. Expression of nucleic acid molecules can be measured using any one of the methods well known in the art for the quantitation of nucleic acid molecules, such as, for example, PCR, RT-PCR, Rnase protection, Northern blotting, other hybridisation methods and the arrays described herein.

[0133] Isolated as used herein means separated “by the hand of man” from its natural state; i.e., that, if it occurs in nature, it has been changed or removed from its original environment, or both. For example, a naturally occurring nucleic acid molecule or a polypeptide naturally present in a living organism in its natural state is not “isolated,” but the same nucleic acid molecule or polypeptide separated from the coexisting materials of its natural state is “isolated”, as the term is employed herein. As part of or following isolation, such nucleic acid molecules can be joined to other nucleic acid molecules, such as DNAs, for mutagenesis, to form fusion proteins, and for propagation or expression in a host, for instance. The isolated nucleic acid molecules, alone or joined to other nucleic acid molecules such as vectors, can be introduced into host cells, in culture or in whole organisms. Introduced into host cells in culture or in whole organisms, such DNAs still would be isolated, as the term is used herein, because they would not be in their naturally occurring form or environment. Similarly, the nucleic acid molecules and polypeptides may occur in a composition, such as a media formulations, solutions for introduction of nucleic acid molecules or polypeptides, for example, into cells, compositions or solutions for chemical or enzymatic reactions, for instance, which are not naturally occurring compositions, and, therein remain isolated nucleic acid molecules or polypeptides within the meaning of that term as it is employed herein.

[0134] The nucleic acids according to the present invention may be chemically synthesized. Alternatively, the nucleic acids can be isolated from S. pyogenes by methods known to the one skilled in the art.

[0135] According to another aspect of the present invention, a comprehensive set of novel hyperimmune serum reactive antigens and fragments thereof are provided by using the herein described antigen identification method. In a preferred embodiment of the invention, a hyperimmune serum-reactive antigen comprising an amino acid sequence being encoded by any one of the nucleic acids molecules herein described and fragments thereof are provided. In another preferred embodiment of the invention a novel set of hyperimmune serum-reactive antigens which comprises amino acid sequences selected from a group consisting of the polypeptide sequences as represented in Seq ID No 151, 154-158, 160-168, 170, 172, 174-182, 184-185, 188-190, 193196, 199-201, 203-204, 207-211, 213, 215-221, 223, 225-227, 231-232, 238, 241-244 and 246-300 and fragments thereof are provided. In a further preferred embodiment of the invention hyperimmune serum-reactive antigens which comprise amino acid sequences selected from a group consisting of the polypeptide sequences as represented in Seq ID No214 and fragments thereof are provided. In a still preferred embodiment of the invention hyperimmune serum-reactive antigens which comprise amino acid sequences selected from a group consisting of the polypeptide sequences as represented in Seq ID No 153, 186, 197-198, 205, 212, 222, 230, 234, 245. and fragments thereof are provided.

[0136] The hyperimmune serum reactive antigens and fragments thereof as provided in the invention include any polypeptide set forth in the Sequence Listing as well as polypeptides which have at least 70% identity to a polypeptide set forth in the Sequence Listing, preferably at least 80% or 85% identity to a polypeptide set forth in the Sequence Listing, and more preferably at least 90% similarity (more preferably at least 90% identity) to a polypeptide set forth in the Sequence Listing and still more preferably at least 95%, 96%, 97%, 98%, 99% or 99.5% similarity (still more preferably at least 95%, 96%, 97%, 98%, 99%, or 99.5% identity) to a polypeptide set forth in the Sequence Listing and also include portions of such polypeptides with such portion of the polypeptide generally containing at least 4 amino acids and more preferably at least 8, still more preferably at least 30, still more preferably at least 50 amino acids, such as 4, 8, 10, 20, 30, 35, 40, 45 or 50 amino acids.

[0137] The invention also relates to fragments, analogs, and derivatives of these hyperimmune serum reactive antigens and fragments thereof. The terms “fragment”, “derivative” and “analog” when referring to an antigen whose amino acid sequence is set forth in the Sequence Listing, means a polypeptide which retains essentially the same biological function or activity as such hyperimmune serum reactive antigen and fragment thereof.

[0138] The fragment, derivative or analog of a hyperimmune serum reactive antigen and fragment thereof may be 1) one in which one or more of the amino acid residues are substituted with a conserved or non-conserved amino acid residue (preferably a conserved amino acid residue) and such substituted amino add residue may or may not be one encoded by the genetic code, or 2) one in which one or more of the amino acid residues includes a substituent group, or 3) one in which the mature hyperimmune serum reactive antigen or fragment thereof is fused with another compound, such as a compound to increase the half-life of the hyperimmune serum reactive antigen and fragment thereof (for example, polyethylene glycol), or 4) one in which the additional amino acids are fused to the mature hyperimmune serum reactive antigen or fragment thereof, such as a leader or secretory sequence or a sequence which is employed for purification of the mature hyperimmune serum reactive antigen or fragment thereof or a proprotein sequence. Such fragments, derivatives and analogs are deemed to be within the scope of those skilled in the art from the teachings herein.

[0139] The present invention also relates to antigens of different S. pyogenes isolates. Such homologues may easily be isolated based on the nucleic acid and amino acid sequences disclosed herein. There are more than 80 M protein serotypes distinguished to date and the typing is based on the variable region at the 5′ end of the emm gene (see e.g. Vitali et al. 2002). The presence of any antigen can accordingly be determined for every M serotype. In addition it is possible to determine the variability of a particular antigen in the various M serotypes as described for the sic gene (Hoe et al., 2001). The influence of the various M serotypes on the kind of disease it causes is summarized in a recent review (Cunningham, 2000). In particular, two groups of serotypes can be distinguished:

[0140] 1) Those causing Pharyngitis and Scarlet fever (e.g. M types 1, 3, 5, 6, 14, 18, 19, 24)

[0141] 2) Those causing Pyoderma and Streptococcal skin infections (e.g. M types 2, 49, 57, 59, 60, 61)

[0142] This can serve as the basis to identify the relevance of an antigen for the use as a vaccine or in general as a drug targeting a specific disease.

[0143] The information e.g. from the homepage of the CDC (http://www.cdc.gov/ncidod/biotech/strep/emmtypes.htm ) gives a dendrogram showing the relatedness of various M serotypes. Further relevant references are Vitali et al., Journal of Clinical Microbiology 40:679-681. (2002) (molecular emm typing method), Enright et al., Infection and Immunity 69:2416-2427. (2001) (alternative molecular typing method (MLST)), Hoe et al., The Journal of Infectious Diseases 183:633-639. (2001)(example for the variation of one antigen (sic) in many different serotypes) and Cunningham, CLINICAL MICROBIOLOGY REVIEWS 13:470-511. (2000)(review on GAS pathogenesis). All emm types are completely listed and may be downloaded from the above mentioned address.

[0144] The dendrogram was constructed by sequential use of the Wisconsin Package Version 10.1, Genetics Computer Group (GCG), Madison programs Pileup, Distances, and Growtree. Basically, 22 residues of signal sequence plus 83 additional N terminal residues were used for the alignments which include selected sequences from the database. The selected sequences include new emm designations 103-124 (described in table below) as well as their dosest “classical” M protein matches. Although this analysis is limited in that the C terminal ends are truncated arbitrarily, this is a typical result in that the dendrogram separates clusters of opacity factor positive strain M sequences from opacity factor strain negative M sequences.

[0145] emm type/previous designation—GenBank accession number—Countries where isolated—Closest N-terminal M protein sequence match (% identity):

[0146] emm103/st2034 U74320 PNG, Bra, Egy, Mal, Nep, NZ, US M87 (66%)

[0147] emm104/st2034 AF056300 PNG, Egy, Mal, Nep, NZ, US M66 (72%)

[0148] emm105/st4529 AF060227 Mal, Nep, NZ, US M5 (45%)

[0149] emm106/st4532 AF077666 Mal, Egy, Iran, Nep M27G (71%)

[0150] emm107/st4264 AF163686 Mal, NZ M25 (52%)

[0151] emm108/st4547 AF052426 Mal, Bra, Egy, Ira, NZ M70 (84%) emm109/st3018 AF077667 Mal, Egy, NZ M28(74%)

[0152] emm110/st4935 U92492 Ind, Bul, NZ, Rus, US M13 (60%)

[0153] emm111/st4973 AF128960 Ind, Bra, Nep, US M80 (40%)

[0154] emm112/stCmuk16 AF091806 Thi, Bra, Rus, US M27L/77 (59%) emm113/st2267 AF078068 NZ, Thai, Chi M13 (50%)

[0155] emm114/st2967 U50338 US, Can, Gam, NZ, PNG M73 (80%)

[0156] emm115/st2980 AF028712 US, Bra, Rus M36 (64%)

[0157] emm116/st2370 AF156180 US, Nep, NZ M52 (60%)

[0158] emm117/st436 AF058801 US M13 (59%)

[0159] emm118/st448 AF058802 US, Bra, Egy, Nep, NZ M49 (79%)

[0160] emm119/st3365 AF083874 US, Br, Nep M52 (59%)

[0161] emm120/st1135 AF296181 Egy M56 (78%)

[0162] emm121/st1161 AF296182 Egy M64 (64%)

[0163] emm122/st1432 AF222860 Egy, Rus, Nep M18 (40%)

[0164] emm123/st6949 AF213451Arg, US, NZM80 (68%)

[0165] st1160/emm124AF149048 and AF018178Egy, Mal, NZM2 (82%)

[0166] Abbreviations: Arg, Argentina; Bra, Brazil; Bul, Bulgaria; Can, Canada; Chi, Chile; Egy, Egypt; Gam, Gambia; Ind, India; Ira, Iran; Mal, Malaysia; Nep, Nepal; NZ, New Zealand; PNG, Papua New Guinea; Thi, Thailand; Rus, Russia; US, United States. %: Closest mature M protein sequence match to predicted 50 mature N terminal residues from serologically characterized Lancefield type.

[0167] emm types and sequence types:

[0168] In many cases the emm sequence reference strains came directly from the M type collection of Dr. Rebecca Lancefield. Such strains are designated RCL.

[0169] The sequences starting with “emm” indicate that isolates represented by this type have been analyzed by several reference laboratories besides the CDC streptococcal laboratories. Each of the “new” emm types emm94 through emm124 are represented by multiple independent isolates recovered from serious disease manifestations, are M protein nontypeable with all typing sera stocks available to international GAS reference laboratories, and demonstrate antiphagocytic properties in vitro by multiplying in normal human blood. Strains with emm sequences starting with “st” (sequence type) have not yet been completely validated by all of the reference laboratories.

[0170] GAS Genetics:

[0171] It has long been known that antiserum against serum opacity factor positive (SOF+) strains inhibits OF activity in a strain-specific manner. Therefore, 500-2700 base variable regions of the sof (serum opacity factor) gene representing at least 60 distinct sof genes were analysed from GAS opacity factor positive strains (and interestingly, a homolog commonly found in OF negative emm12 isolates and emm/M type 12 reference strain). It was found that sof gene sequences are also remarkably variable among the different GAS strains, although usually well conserved within an emm type. Important strains include therefore emm1, emm100, emm101, emm102, emm103, emm104, emm105, emm106, emm107, emm108, emm109, emm11, emm110, emm111, emm112, emm113, emm114, emm115, emm116, emm117, emm118, emm119, emm12, emm121, emm121, emm122, emm123, emm124, emm13L, emm14, emm15, emm17, emm18, emm19, emm2, emm22, emm23, emm24, emm25, emu26, emm27G, emm28, emm29, emm3, emm30, emm31, emm32, emm33, emm34, emm36, emm37, emm38, emm39, emm4, emm40, emm41, emm42, emm43, emm44, emm46, emm47, emm48, emm49, emm5, emm50, emm51, emm52, emm53, emm54, emm55, emm56, emm57, emm58, emm59, emm6, emm60, emm61, emm62, emm63, emm64, emm65, emm66, emm67, emm68,mm69, emm70, emm71, emm72, emm73, emm74, emm75, emm76, emm77, emm78, emm79, emm8, emm80, emm81, emm82, emm83, emm84, emm85, emm86, emm87, emm88, emm89, emm9, emm90, emm91, emm92,emm93, emm94, emm95, emm96, emm97, emm98, emm99 , st1389, st1731, st1759, st1815 , st1967, st1969, st1rp31, st11014, st2037, st204, st211, st213, st2147, st1207, st245, st2460, st2461, st2463, st2904, st2911, st2917, st2926, st2940, st369, st3757, st3765, st3850, st5282, st6735, st7700, st809, st833, st854, st980584, stck249, stck401, std432, std631, std633, stIL103, stIL62, stns292, stns554, sts104, stc1400, stc1741, stc36, stc3852, stc5344, stc5345, stc57, stc6979, stc74a, stc839, stg10, stg11, stg1389, stg166b, stg1750, stg2078, stg3390, stg4222, stg4545, stg480, stg4831, stg485, stg4974, stg5063, stg6, stg62647, stg643, stg652, stg653, stg663, stg840, stg93464, stg97, stL1376, stL1929 and stL2764.

[0172] Among the particularly preferred embodiments of the invention in this regard are the hyperimmune serum reactive antigens set forth in the Sequence Listing, variants, analogs, derivatives and fragments thereof, and variants, analogs and derivatives of fragments. Additionally, fusion polypeptides comprising such hyperimmune serum reactive antigens, variants, analogs, derivatives and fragments thereof, and variants, analogs and derivatives of the fragments are also encompassed by the present invention. Such fusion polypeptides and proteins, as well as nucleic acid molecules encoding them, can readily be made using standard techniques, including standard recombinant techniques for producing and expression a recombinant polynucleic acid encoding a fusion protein.

[0173] Among preferred variants are those that vary from a reference by conservative amino acid substitutions. Such substitutions are those that substitute a given amino acid in a polypeptide by another amino acid of like characteristics. Typically seen as conservative substitutions are the replacements, one for another, among the aliphatic amino acids Ala, Val, Leu and Ile; interchange of the hydroxyl residues Ser and Thr, exchange of the acidic residues Asp and Glu, substitution between the amide residues Asn and Gln, exchange of the basic residues Lys and Arg and replacements among the aromatic residues Phe and Tyr.

[0174] Further particularly preferred in this regard are variants, analogs, derivatives and fragments, and variants, analogs and derivatives of the fragments, having the amino acid sequence of any polypeptide set forth in the Sequence Listing, in which several, a few, 5 to 10, 1 to 5, 1 to 3, 2, 1 or no amino acid residues are substituted, deleted or added, in any combination. Especially preferred among these are silent substitutions, additions and deletions, which do not alter the properties and activities of the polypeptide of the present invention. Also especially preferred in this regard are conservative substitutions. Most highly preferred are polypeptides having an amino acid sequence set forth in the Sequence Listing without substitutions. Specifically suitable amino acid substitutions are those which are contained in homologues for the sequences disclosed in the Sequence Listing according to the present application. A suitable sequence derivative of an antigen or epitope as disclosed herein therefore includes one or more variations being present in one or more strains or serotypes of S. pyogenes (preferably 1, 2, 3, 4, 5, 6, 7, 8, 9, or 10 amino acid exchanges which are based on such homolog variations). Such antigens comprise sequences which may be naturally occurring sequences or newly created artificial sequences. These preferred antigen variants are based on such naturally occurring sequence variations, e.g. forming a “master sequence” for the antigenic regions of the polypeptides according to the present invention. Suitable examples for such homolog variations or exchanges are given in table 5 in the example section. For example, a given S. pyogenes sequence may be amended by including such one or more variations thereby creating an artificial (i.e. non-naturally occurring) variant of this given (naturally occurring) antigen or epitope sequence.

[0175] The hyperimmune serum reactive antigens and fragments thereof of the present invention are preferably provided in an isolated form, and preferably are purified to homogeneity.

[0176] Also among preferred embodiments of the present invention are polypeptides comprising fragments of the polypeptides having the amino acid sequence set forth in the Sequence Listing, and fragments of variants and derivatives of the polypeptides set forth in the Sequence Listing.

[0177] In this regard a fragment is a polypeptide having an amino acid sequence that entirely is the same as part but not all of the amino acid sequence of the afore mentioned hyperimmune serum reactive antigen and fragment thereof, and variants or derivative, analogs, fragments thereof. Such fragments may be “free-standing”, i.e., not part of or fused to other amino acids or polypeptides, or they may be comprised within a larger polypeptide of which they form a part or region. Also preferred in this aspect of the invention are fragments characterised by structural or functional attributes of the polypeptide of the present invention, i.e. fragments that comprise alpha-helix and alpha-helix forming regions, beta-sheet and beta-sheet forming regions, turn and turn-forming regions, coil and coil-forming regions, hydrophilic regions, hydrophobic regions, alpha amphipathic regions, beta-amphipathic regions, flexible regions, surface-forming regions, substrate binding regions, and high antigenic index regions of the polypeptide of the present invention, and combinations of such fragments. Preferred regions are those that mediate activities of the hyperimmune serum reactive antigens and fragments thereof of the present invention. Most highly preferred in this regard are fragments that have a chemical, biological or other activity of the hyperimmune serum reactive antigen and fragments thereof of the present invention, including those with a similar activity or an improved activity, or with a decreased undesirable activity. Particularly preferred are fragments comprising receptors or domains of enzymes that confer a function essential for viability of S. pyogenes or the ability to cause disease in humans. Further preferred polypeptide fragments are those that comprise or contain antigenic or immunogenic determinants in an animal, especially in a human.

[0178] An antigenic fragment is defined as a fragment of the identified antigen which is for itself antigenic or may be made antigenic when provided as a hapten. Therefore, also antigens- or antigenic fragments showing one or (for longer fragments) only a few amino acid exchanges are enabled with the present invention, provided that the antigenic capacities of such fragments with amino acid exchanges are not severely deteriorated on the exchange(s), i.e., suited for eliciting an appropriate immune response in an individual vaccinated with this antigen and identified by individual antibody preparations from individual sera.

[0179] Preferred examples of such fragments of a hyperimmune serum-reactive antigen are selected from the group consisting of peptides comprising amino acid sequences of column “predicted immunogenic aa”, and “Location of identified immunogenic region” of Table 1; the serum reactive epitopes of Table 2, especially peptides comprising amino acid 4-44, 57-65, 67-98, 101-107, 109-125, 131-144, 146-159, 168-173, 181-186, 191-200, 206-213, 229-245, 261-269, 288-301, 304-317, 323-328, 350-361, 374-384, 388-407, 416-425 and 1-114 of Seq ID No 151; 5-17, 49-64, 77-82, 87-98, 118-125, 127-140, 142-150, 153-159, 191-207, 212-218, 226-270, 274-287, 297-306, 325-331, 340-347, 352-369, 377-382, 390-395 and 29-226 of Seq ID No 152; 4-16, 20-26, 32-74, 76-87, 93-108, 116-141, 148-162, 165-180, 206-219, 221-228, 230-236, 239-245. 257-268, 313-328, 330-335, 353-359, 367-375, 394-403, 414-434, 437444, 446-453, 456-464, 478-487, 526-535, 541-552, 568-575, 577-584, 589-598, 610-618, 624-643, 653-665, 667-681, 697-718, 730-748, 755-761, 773-794, 806-821, 823-831, 837-845, 862-877, 879-889, 896-919, 924-930, 935-940, 947-955, 959-964, 969-986, 991-1002-1036, 1047-1056, 1067-1073, 1079-1085, 1088-1111, 1130-1135, 1148-1164, 1166-1173, 1185-1192, 1244-1254 and 919-929 of Seq ID No 153; 5-44, 62-74, 78-83, 99-105, 107-113, 124-134, 161-174, 176-194, 203-211, 216-237, 241-247, 253-266, 272-299, 323-349, 353-360 and 145-305 of Seq ID No 154; 15-39, 52-61, 72-81, 92-97 and 71-81 of Seq ID No 155; 13-19, 21-31, 40-108, 115-122, 125-140, 158-180, 187-203, 210-223, 235-245 and 173-186 of Seq ID No 156; 5-12, 19-27, 29-39, 59-67, 71-78, 80-88, 92-104, 107-124, 129-142, 158-168, 185-191, 218-226, 230-243, 256-267, 272-277, 283-291, 307-325, 331-344, 346-352 and 316-331 of Seq ID No 157; 6-28, 43-53, 60-76, 93-103 and 21-99 of Seq ID No 158; 10-30, 120-126, 145-151, 159-169, 174-182, 191-196, 201-206, 214-220, 222-232, 254-272, 292-307, 313-323, 332-353, 361-369, 389-396, 401-415, 428-439, 465-481, 510-517, 560-568 and 9-264 of Seq ID No 159; 5-29, 39-45, 107-128 and 1-112 of Seq ID No 160; 4-38, 42-50, 54-60, 65-71, 91-102 and 21-56 of Seq ID No 161; 4-13, 19-25, 41-51, 54-62, 68-75, 79-89, 109-122, 130-136, 172-189, 192-198, 217-224, 262-268, 270-276, 281-298, 315-324, 333-342, 353-370, 376-391 and 23-39 of Seq ID No 162; 6-41, 49-58, 62-103, 117-124, 147-166, 173-194, 204-211, 221-229, 255-261, 269-284, 288-310, 319-325, 348-380, 383-389, 402-410, 424-443, 467-479, 496-517, 535-553, 555-565, 574-581, 583-591 and 474-489 of Seq ID No 163; 8-35, 52-57, 66-73, 81-88, 108-114, 125-131, 160-167, 174-180, 230-235, 237-249, 254-262, 278-285, 308-314, 321-326, 344-353, 358-372, 376-383, 393-411, 439-446, 453464, 471-480, 485-492, 502-508, 523-529, 533-556, 558-563, 567-584, 589-597, 605-619, 625-645, 647-666, 671-678, 690-714, 721-728, 741-763, 776-773, 777-787, 792-802, 809-823, 849-864 and 37-241, 409-534, 582-604, 743-804 of Seq ID No 164; 4-17, 24-36-44, 59-67, 72-90, 92-121, 126-149, 151-159, 161-175, 197-215, 217-227, 241-247, 257-264, 266-275, 277-284, 293-307, 315-321, 330-337, 345-350, 357-366, 385-416 and 202-337 of Seq ID No 165; 4-20, 22-46, 49-70, 80-89, 96-103, 105-119, 123-129, 153-160, 181-223, 227-233, 236-243, 248-255, 261-269, 274-279, 283-299,305-313, 315-332, 339-344, 349-362, 365-373, 380-388, 391-397, 402-407 and 1-48 of Seq ID No 166; 18-37, 41-63, 100-106, 109-151, 153-167, 170-197, 199-207, 212-229, 232-253, 273-297 and 203-217 of Seq ID No 167; 20-26, 54-61, 80-88, 94-101, 113-119, 128-136, 138-144, 156-188, 193-201, 209-217, 221-229, 239-244, 251-257, 270-278, 281-290, 308-315, 319-332, 339-352, 370-381, 388-400, 411-417, 426435, 468-482, 488-497, 499-506, 512-521 and 261-273 of Seq ID No 168; 6-12, 16-36, 50-56, 86-92, 115-125, 143-152, 163-172, 193-203, 235-244, 280-289, 302-315, 325-348, 370-379, 399-405, 411-417, 419-429, 441-449, 463-472, 482-490, 500-516, 536-543, 561-569, 587-594, 620-636, 647-653, 659-664, 677-685, 687-693, 713-719, 733-740, 746-754, 756-779, 792-799, 808-817, 822-828, 851-865, 902-908, 920-938, 946-952, 969-976, 988-1005, 1018-1027, 1045-1057, 1063-1069, 1071-1078, 1090-1099, 1101-1109, 1113-1127, 1130-1137, 1162-1174, 1211-1221, 1234-1242, 1261-1268, 1278-1284, 1312-1317, 1319-1326, 1345-1353, 1366-1378, 1382-1394, 1396-1413, 1415-1424, 1442-1457, 1467-1474, 1482-1490, 1492-1530, 1537-1549, 1559-1576, 1611-1616, 1624-1641 and 1-414, 443614, 997-1392 of Seq ID No 169; 14-42, 70-75, 90-100, 158-181 and 1-164 of Seq ID No 170; 4-21, 30-36, 54-82, 89-97, 105-118, 138-147 and 126-207 of Seq ID No 171; 4-21, 31-66, 96-104, 106-113, 131-142 and 180-204 of Seq Id No 172; 5-23, 31-36, 38-55, 65-74, 79-88, 101-129, 131-154, 156-165, 183-194, 225-237, 245-261, 264-271, 279-284, 287-297, 313-319, 327-336, 343-363, 380-386 and 11-197, 204-219, 258-372 of Seq ID No 173; 4-20, 34-41, 71-86, 100-110, 113-124, 133-143, 150-158, 160-166, 175-182, 191-197, 213-223, 233-239, 259-278, 298-322 and 195-289 of Seq ID No 174; 4-10, 21-35, 44-52, 54-62, 67-73, 87-103, 106-135, 161-174, 177-192, 200-209, 216-233, 249-298, 304-312, 315-329 and 12-130 of Seq ID No 175; 10-27, 33-38, 48-55, 70-76, 96-107, 119-133, 141-147, 151-165, 183-190, 197-210, 228-236, 245-250, 266-272, 289-295, 297-306, 308-315, 323-352, 357-371, 381-390, 394-401, 404-415, 417-425, 427-462, 466-483, 485-496, 502-507, 520-529, 531-541, 553-570, 577-588, 591-596, 600-610, 619-632, 642-665, 671-692, 694-707 and 434-444 of Seq ID No 176; 6-14, 16-25, 36-46, 52-70, 83-111, 129-138, 140-149, 153-166, 169-181, 188-206, 212-220, 223-259, 261-269, 274-282, 286-293, 297-306, 313-319, 329-341, 343-359, 377-390, 409-415, 425-430 and 360-375 of Seq ID No 177; 4-26, 28-48, 54-62, 88-121, 147-162, 164-201, 203-237, 245-251 and 254-260 of Seq ID No 178; 12-21, 26-32, 66-72, 87-93, 98-112, 125-149, 179-203, 209-226, 23242, 249-261, 266-271, 273-289, 293-318, 346-354, 360-371, 391-400 and 369-382 of Seq ID No 179; 11-38, 44-65, 70-87, 129-135, 140-163, 171-177, 225-232, 238-249, 258-266, 271-280, 284-291, 295-300, 329-337, 344-352, 405-412, 416-424, 426-434, 436-455, 462475, 478-487 and 270-312 of Seq ID No 180; 5-17, 34-45, 59-69, 82-88, 117-129, 137-142, 158-165, 180-195, 201-206, 219-226, 241-260, 269-279, 292-305, 312-321, 341-347, 362-381, 396-410, 413432, 434-445, 447-453, 482-487, 492-499, 507-516, 546-552, 556-565, 587-604 and 486-598 of Seq ID No 181; 4-15, 17-32, 40-47, 67-78, 90-98, 101-107, 111-136, 161-171, 184-198, 208-214, 234-245, 247-254, 272-279, 288-298, 303-310, 315-320, 327-333, 338-349, 364-374 and 378-396 of Seq ID No 182; 5-27, 33-49, 51-57, 74-81, 95-107, 130-137, 148-157, 173-184 and 75-235 of Seq ID No 183; 6-23, 47-53, 57-63, 75-82, 97-105, 113-122, 124-134, 142-153, 159-164, 169-179, 181-187, 192-208, 215-243, 247-257, 285-290, 303-310 and 30-51 of Seq ID No 184; 17-29, 44-52, 59-73, 77-83, 86-92, 97-110, 118-153, 156-166, 173-179, 192-209, 225-231, 234-240, 245-251, 260-268, 274-279, 297-306, 328-340, 353-360, 369-382, 384-397, 414-423, 431-436, 452-465, 492-498, 500-508, 516-552, 554-560, 568-574, 580-586, 609-617, 620-626, 641-647 and 208-219 of Seq ID No 185; 4-26, 32-45, 58-72, 111-119, 137-143, 146-159, 187-193, 221-231, 235-242, 250-273, 290-304, 311-321, 326-339, 341-347, 354-368, 397403, 412-419, 426-432, 487-506, 580-592, 619-628, 663-685, 707-716, 743-751, 770-776, 787-792, 850-859, 866-873, 882-888, 922-931, 957-963, 975-981, 983-989, 1000-1008, 1023-1029, 1058-1064, 1089-1099, 1107-1114, 1139-1145, 1147-1156, 1217-1226, 1276-1281, 1329-1335, 1355-1366, 1382-1394, 1410-1416, 1418-1424, 1443-1451, 1461-1469, 1483-1489, 1491-1501, 1515-1522, 1538-1544, 1549-1561, 1587-1593, 1603-1613, 1625-1630, 1636-1641, 1684-1690, 1706-1723, 1765-1771, 1787-1804, 1850-1857, 1863-1894, 1897-1910, 1926-1935, 1937-1943, 1960-1983, 1991-2005, 2008-2014, 2018-2039 and 396-533, 1342-1502, 1672-1920 of Seq ID No 186; 4-25, 45-50, 53-65, 79-85, 87-92, 99-109, 126-137, 141-148, 156-183, 190-203, 212-217, 221-228, 235-242, 247-277, 287-293, 300-319, 321-330, 341-361, 378-389, 394-406, 437-449, 455-461, 472-478, 482-491, 507-522, 544-554, 576-582, 587-593, 611-621, 626-632, 649-661, 679-685, 696-704, 706-716, 726-736, 740-751, 759-766, 786-792, 797-802, 810-822, 824-832, 843-852, 863-869, 874-879, 882-905 and 1-113, 210-232, 250-423, 536-564 of Seq ID No 187; 4-16, 33-39, 43-49, 54-85, 107-123, 131-147, 157-169, 177-187, 198-209, 220-230, 238-248, 277-286, 293-301, 303-315, 319-379, 383-393, 402-414, 426-432, 439-449, 470-478, 483-497, 502-535, 552-566, 571-582, 596-601, 608-620, 631-643, 651-656, 663-678, 680-699, 705-717, 724-732, 738-748, 756-763, 766-772, 776-791, 796-810, 819-827, 829-841, 847-861, 866-871, 876-882, 887-894, 909-934, 941-947, 957-969, 986-994, 998-1028, 1033-1070, 1073-1080, 1090-1096, 1098-1132, 1134-1159, 1164-1172, 1174-1201 and 617-635 of Seq ID No 188; 7-25, 30-40, 42-64, 70-77, 85-118, 120-166, 169-199, 202-213, 222-244 and 190-203 of Seq ID No 189; 4-11, 15-53, 55-93, 95-113, 120-159, 164-200, 210-243, 250-258, 261-283, 298-319, 327-340, 356-366, 369-376, 380-386, 394-406, 409421, 425-435, 442-454, 461-472, 480-490, 494-505, 507-514, 521-527, 533-544, 566-574 and 385-398 of Seq ID No 190; 5-36, 66-72, 120-127, 146-152, 159-168, 172-184, 205-210, 221-232, 234-243, 251-275, 295-305, 325-332, 367-373, 470-479, 482-487, 520-548, 592-600, 605-615, 627-642, 655-662, 664-698, 718-725, 734-763, 776-784, 798-809, 811-842, 845-852, 867-872, 879-888, 900-928, 933-940, 972-977, 982-1003 and 12-190, 276-283, 666-806 of Seq ID No 191; 4-38, 63-68, 100-114, 160-173, 183-192, 195-210, 212-219, 221-238, 240-256, 258-266, 274-290, 301-311, 313-319, 332-341, 357-363, 395-401, 405-410, 420-426, 435-450, 453-461, 468-475, 491-498, 510-518, 529-537, 545-552, 585-592, 602-611, 634-639, 650-664 and 30-80, 89-105, 111-151 of Seq ID No 192; 7-29, 31-39, 47-54, 63-74, 81-94, 97-117, 122-127, 146-157, 168-192, 195-204, 216-240, 251-259 and 195-203 of Seq ID No193; 5-16, 28-34, 46-65, 79-94, 98-105, 107-113, 120-134, 147-158, 163-172, 180-186, 226-233, 237-251, 253-259, 275-285, 287-294, 302-308, 315-321, 334-344, 360-371, 399412, 420-426 and 32-50 of Seq ID No 194; 8-20, 30-36, 71-79, 90-96, 106-117, 125-138, 141-147, 166-174 and 75-90 of Seq ID No 195; 4-13, 15-33, 43-52, 63-85, 98-114, 131-139, 146-174, 186-192, 198-206, 227-233 and 69-88 of Seq ID No 196; 4-22, 29-35, 59-68, 153-170, 213-219, 224-238, 240-246, 263-270, 285-292, 301-321, 327-346, 356-371, 389-405, 411-418, 421-427, 430-437, 450-467, 472-477, 482-487, 513-518, 531-538, 569-576, 606-614, 637-657, 662-667, 673-690, 743-753, 760-767, 770-777, 786-802 and 96-230, 361-491, 572-585 of Seq ID No 197; 4-12, 21-36, 48-55, 74-82, 121-127, 195-203, 207-228, 247-262, 269-278, 280-289 and 102-210 of Seq ID No 198; 13-20, 23-31, 38-44, 78-107, 110-118, 122-144, 151-164, 176-182, 190-198, 209-216, 219-243, 251-256, 289-304, 306-313 and 240-248 of Seq ID No 199; 5-26, 34-48, 57-77, 84-102, 116-132, 139-145, 150-162, 165-173, 176-187, 192-205, 216-221, 234-248, 250-260 and 182-198 of Seq ID No 200; 10-19, 2644, 53-62, 69-87, 90-96, 121-127, 141-146, 148-158, 175-193, 204-259, 307-313, 334-348, 360-365, 370-401, 411-439, 441-450, 455-462, 467-472, 488-504 and 41-56 of Seq ID No 201; 5-21, 36-42, 96-116, 123-130, 138-144, 146-157, 184-201, 213-228, 252-259, 277-297, 308-313, 318-323, 327-333 and 202-217 of Seq ID No 202; 6-26, 33-51, 72-90, 97-131, 147-154, 164-171, 187-216, 231-236, 260-269, 275-283 and 1-127 of Seq ID No 203; 4-22, 24-38, 44-58, 72-88, 99-108, 110-117, 123-129, 131-137, 142-147, 167-178, 181-190, 206-214, 217-223, 271-282, 290-305, 320-327, 329-336, 343-352, 354-364, 396-402, 425-434, 451-456, 471-477, 485-491, 515-541, 544-583, 595-609, 611-626, 644-656, 660-681, 683-691, 695-718 and 297-458 of Seq ID No 204; 543, 92-102, 107-116, 120-130, 137-144, 155-163, 169-174, 193-213 and 24-135 of Seq ID No 205; 4-25, 61-69, 73-85, 88-95, 97-109, 111-130, 135-147, 150-157, 159-179, 182-201, 206-212, 224-248, 253-260, 287-295, 314-331, 338-344, 365-376, 396-405, 413-422, 424430, 432-449, 478-485, 487-494, 503-517, 522-536, 544-560, 564-578, 585-590, 597-613, 615-623, 629-636, 640-649, 662-671, 713-721 and 176-330 of Seq ID No 206; 31-37, 41-52, 58-79, 82-105, 133-179, 184-193, 199-205, 209-226, 256-277, 281-195, 297-314, 322-328, 331-337, 359-367, 379-395, 403-409, 417-432, 442-447, 451-460, 466-472 and 46-62, 296-341 of Seq ID No 207; 23-29, 56-63, 67-74, 96-108, 122-132, 139-146, 152-159, 167-178, 189-196, 214-213, 247-265, 274-293, 301-309, 326-332, 356-363, 378-395, 406-412, 436-442, 445-451, 465-479, 487-501, 528-555, 567-581, 583-599, 610-617, 622-629, 638-662, 681-686, 694-700, 711-716 and 667-684 of Seq ID No 208; 20-51, 53-59, 109-115, 140-154, 185-191, 201-209, 212-218, 234-243, 253-263, 277-290, 303-313, 327-337, 342-349, 374-382, 394-410, 436-442, 464-477, 486-499, 521-530, 536-550, 560-566, 569-583, 652-672, 680-686, 698-704, 718-746, 758-770, 774-788, 802-827, 835-842, 861-869 and 258-416 of Seq ID No 209; 7-25, 39-45, 59-70, 92-108, 116-127, 161-168, 202-211, 217-227, 229-239, 254-262, 271-278, 291-300 and 278-295 of Seq ID No 210; 4-20, 27-33, 45-51, 53-62, 66-74, 81-88, 98-111, 124-130, 136-144, 156-179, 183-191 and 183-195 of Seq ID No 211; 12-24, 27-33, 43-49, 55-71, 77-85, 122-131, 168-177, 179-203, 209-214, 226-241 and 63-238 of Seq ID No 212; 4-19, 37-50, 120-126, 131-137, 139-162, 177-195, 200-209, 211-218, 233-256, 260-268, 271-283, 288-308 and 1-141 of Seq ID No 213; 11-17, 40-47, 57-63, 96-124, 141-162, 170-207, 223-235, 241-265, 271-277, 281-300, 312-318, 327-333, 373-379 and 231-368 of Seq ID No 214; 9-33, 4148, 57-79, 97-103, 113-138, 146-157, 165-186, 195-201, 209-215, 223-229, 237-247, 277-286, 290-297, 328-342 and 247-260 of Seq ID No 215; 7-15, 39-45, 58-64, 79-84, 97-127, 130-141, 163-176, 195-203, 216-225, 235-247, 254-264, 271-279 and 64-72 of Seq ID No 216; 4-12, 26-42, 46-65, 73-80, 82-94, 116-125, 135-146, 167-173, 183-190, 232-271, 274-282, 300-306, 320-343, 351-362, 373-383, 385-391, 402-409, 414-426, 434-455, 460-466, 473-481, 485-503, 519-525, 533-542, 554-565, 599-624, 645-651, 675-693, 717-725, 751-758, 767-785, 792-797, 801-809, 819-825, 831-836, 859-869, 890-897 and 222-362, 756-896 of Seq ID No 217; 11-17, 22-28, 52-69, 73-83, 86-97, 123-148, 150-164, 166-177, 179-186, 188-199, 219-225, 229-243, 250-255 and 153-170 of Seq ID No 218; 4-61, 71-80, 83-90, 92-128, 133-153, 167-182, 184-192, 198-212 and 56-73 of Seq ID No 219; 4-19, 26-37, 45-52, 58-66, 71-77, 84-92, 94-101, 107-118, 120-133, 156-168, 170-179, 208-216, 228-238, 253-273, 280-296, 303-317, 326-334 and 298-312 of Seq ID No 220; 7-13, 27-35, 38-56, 85-108, 113-121, 123-160, 163-169, 172-183, 188-200, 206-211, 219-238, 247-254 and 141-157 of Seq ID No 221; 23-39, 45-73, 86-103, 107-115, 125-132, 137-146, 148-158, 160-168, 172-179, 185-192, 200-207, 210-224, 233-239, 246-255, 285-334, 338-352, 355-379, 383-389, 408-417, 423-429, 446-456, 460-473, 478-503, 522-540, 553-562, 568-577, 596-602, 620-636, 640-649, 655-663 and 433-440, 572-593 of Seq ID No 222; 4-42, 46-58, 64-76, 118-124, 130-137, 148-156, 164-169, 175-182, 187-194, 203-218, 220-227, 241-246, 254-259, 264-270, 275-289, 296-305, 309-314, 322-334, 342-354, 398-405, 419-426, 432-443, 462-475, 552-530, 552-567, 593-607, 618-634, 636-647, 653-658, 662-670, 681-695, 698-707, 709-720, 732-742, 767-792, 794-822, 828-842, 851-866, 881-890, 895-903, 928-934, 940-963, 978-986, 1003-1025, 1027-1043, 1058-1075, 1080-1087, 1095-1109, 1116-1122, 1133-1138, 1168-1174, 1179-1186, 1207-1214, 1248-1267 and 17-319, 417-563 of Seq ID No 223; 6-19, 23-33, 129-138, 140-150, 153-184, 190-198, 206-219, 235-245, 267-275, 284-289, 303-310, 322-328, 354-404, 407-413, 423-446, 453-462, 467-481, 491-500 and 46-187 of Seq ID No 224; 4-34, 39-57, 78-86, 106-116, 141-151, 156-162, 165-172, 213-237, 252-260, 262-268, 272-279, 296-307, 332-338, 397-403, 406-416, 431-446, 448-453, 464-470, 503-515, 519-525, 534-540, 551-563, 578-593, 646-668, 693-699, 703-719, 738-744, 748-759, 771-777, 807-813, 840-847, 870-876, 897-903, 910-925, 967-976, 979-992 and 21-244, 381-499, 818-959 of Seq ID No 225; 19-29, 65-75, 90-109, 111-137, 155-165, 169-175 and 118-136 of Seq ID No 226; 15-20, 30-36, 55-63, 73-79, 90-117, 120-127, 136-149, 166-188, 195-203, 211-223, 242-255, 264-269, 281-287, 325-330, 334-341, 348-366, 395-408, 423-429, 436-444, 452465 and 147-155 of Seq ID No 227; 11-18, 21-53, 77-83, 91-98, 109-119, 142-163, 173-181, 193-208, 216-227, 238-255, 261-268, 274-286, 290-297, 308-315, 326-332, 352-359, 377-395, 399-406, 418-426, 428-438, 442-448, 458-465, 473-482, 488-499, 514-524, 543-553, 564-600, 623-632, 647-654, 660-669, 672-678, 710-723, 739-749, 787-793, 82Q-828, 838-860, 889-895, 901-907, 924-939, 956-962, 969-976, 991-999, 1012-1018, 1024-1029, 1035-1072, 1078-1091, 1142-1161 and 74-438 of Seq ID No 228; 4-31, 41-52, 58-63, 65-73, 83-88, 102-117, 123-130, 150-172, 177-195, 207-217, 222-235, 247-253, 295-305, 315-328, 335-342, 359-365, 389-394, 404-413 and 156-420 of Seq ID No 229; 4-42, 56-69, 98-108, 120-125, 210-216, 225-231, 276-285, 304-310, 313-318, 322-343 and 79-348 of Seq ID No 230; 12-21, 24-30, 42-50, 61-67, 69-85, 90-97, 110-143, 155-168 and 53-70 of Seq ID No 231; 4-26, 41-54, 71-78, 88-96, 116-127, 140-149, 151-158, 161-175, 190-196, 201-208, 220-226, 240-247, 266-281, 298-305, 308-318, 321-329, 344-353, 370-378, 384-405, 418-426, 429-442, 457-463, 494-505, 514-522 and 183-341 of Seq ID No 232; 4-27, 69-77, 79-101, 117-123, 126-142, 155-161, 171-186, 200-206, 213-231, 233-244, 258-263, 269-275, 315-331, 337-346, 349-372, 376-381, 401-410, 424-445, 447-455, 463-470, 478-484, 520-536, 546-555, 558-569, 580-597, 603-618, 628-638, 648-660, 668-683, 717-723, 765-771, 781-788, 792-806, 812-822 and 92-231, 618-757 of Seq ID No 233; 11-47, 63-75, 108-117, 119-128, 133-143, 171-185, 190-196, 226-232, 257-264, 278-283, 297-309, 332-338, 341-346, 351-358, 362-372 and 41-170 of Seq ID No 234; 6-26, 50-56, 83-89, 108-114, 123-131, 172-181, 194-200, 221-238, 241-259, 263-271, 284-292, 304-319, 321-335, 353-358, 384-391, 408-417, 424-430, 442448, 459-466, 487-500, 514-528, 541-556, 572-578, 595-601, 605-613, 620-631, 634-648, 660-679, 686-693, 702-708, 716-725, 730-735, 749-755, 770-777, 805-811, 831-837, 843-851, 854-860, 863-869, 895-901, 904-914, 922-929, 933-938, 947-952, 956-963, 1000-1005, 1008-1014, 1021-1030, 1131-1137, 1154-1164, 1166-1174 and 20-487, 757-1153 of Seq ID No 235; 10-34, 67-78, 131-146, 160-175, 189-194, 201-214, 239-250, 265-271, 296-305 and 26-74, 91-100, 105-300 of Seq ID No 236; 9-15, 19-32, 109-122, 143-150, 171-180, 186-191, 209-217, 223-229, 260-273, 302-315, 340-346, 353-359, 377-383, 389-406, 420-426, 460-480 and 10-223, 231-251, 264-297, 312-336 of Seq ID No 237; 5-28, 76-81, 180-195, 203-209, 211-219, 227-234, 242-252, 271-282, 317-325, 350-356, 358-364, 394-400, 405-413, 417-424, 430-436, 443-449, 462-482, 488-498, 503-509, 525-537 and 22-344 of Seq ID No 238; 5-28, 42-54, 77-83, 86-93, 98-104, 120-127, 145-159, 166-176, 181-187, 189-197, 213-218, 230-237, 263-271, 285-291, 299-305, 326-346, 368-375, 390-395 and 1-151 of Seq ID No 239; 6-34, 48-55, 58-64, 84-101, 121-127, 143-149, 153-159, 163-170, 173-181, 216-225, 227-240, 248-254, 275-290, 349-364, 375410, 412-418, 432-438, 445-451, 465-475, 488-496, 505-515, 558-564, 571-579, 585-595, 604-613, 626-643, 652-659, 677-686, 688-696, 702-709, 731-747, 777-795, 820-828, 836-842, 845-856, 863-868, 874-882, 900-909, 926-943, 961-976, 980-986, 992-998, 1022-1034, 1044-1074, 1085-1096, 1101-1112, 1117-1123, 1130-1147, 1181-1187, 1204-1211, 1213-1223, 1226-1239, 1242-1249, 1265-1271, 1273-1293, 1300-1308, 1361-1367, 1378-1384, 1395-1406, 1420-1428, 1439-1446, 1454-1460, 1477-1487, 1509-1520, 1526-1536, 1557-1574, 1585-1596, 1605-1617, 1621-1627, 1631-1637, 1648-1654, 1675-1689, 1692-1698, 1700-1706, 1712-1719, 1743-1756 and 91-263 of Seq ID No 240; 4-16, 75-90, 101-136, 138-144, 158-164, 171-177, 191-201, 214-222, 231-241, 284-290, 297-305, 311-321, 330-339, 352-369, 378-385, 403-412, 414-422, 428-435, 457-473, 503-521, 546-554, 562-568, 571-582, 589-594, 600-608, 626-635, 652-669, 687-702, 706-712, 718-724, 748-760, 770-775 and 261-272 of Seq ID No 241; 4-19, 30-41, 46-57, 62-68, 75-92, 126-132, 149-156, 158-168, 171-184, 187-194, 210-216, 218-238, 245-253, 306-312, 323-329, 340-351, 365-373, 384-391, 399-405, 422-432, 454-465, 471-481, 502-519, 530-541, 550-562, 566-572, 576-582, 593-599, 620-634, 637-643, 645-651, 657-664, 688-701 and 541-551 of Seq ID No 242; 6-11, 17-25, 53-58, 80-86, 91-99, 101-113, 123-131, 162-169, 181-188, 199-231, 245-252 and 84-254 of Seq ID No 243; 13-30, 71-120, 125-137, 139-145, 184-199 and 61-78 of Seq ID No 244; 9-30, 38-53, 63-70, 74-97, 103-150, 158-175, 183-217, 225-253, 260-268, 272-286, 290-341, 352-428, 434-450, 453-460, 469-478, 513-525, 527-534, 554-563, 586-600, 602-610, 623-640, 656-684, 707-729, 735-749, 757-763, 766-772, 779-788, 799-805, 807-815, 819-826, 831-855 and 568-580 of Seq ID No 245; 11-21, 29-38 and 5-17 of Seq ID No 246; 2-9 of Seq ID No 247; 4-10, 16-28 and 7-18, 26-34 of Seq ID No 248; 10-16 and 1-15 of Seq ID No 249; 4-11 of Seq ID No 250; 4-40, 42-51 and 37-53 of Seq ID No 251; 4-21 and 22-29 of Seq ID No 252; 2-11 Seq ID No 253; 9-17, 32-44 and 1-22 of Seq ID No 254; 19-25, 27-32 and 15-34 of Seq ID No 255; 4-12, 15-22 and 11-33 of Seq ID No 256; 10-17, 24-30, 39-46, 51-70 and 51-61 of Seq ID No 257; 6-19 of Seq ID No 258; 6-11, 21-27, 31-54 and 11-29 of Seq ID No 259; 4-10, 13-45 and 11-35 of Seq ID No 260; 4-14, 23-32 and 11-35 of Seq ID No 261; 14-39, 45-51 and 15-29 of Seq ID No 262; 4-11, 14-28 and 4-17 of Seq ID No 263; 4-16 and 2-16 of Seq ID No 264; 4-10, 12-19, 39-50 and 6-22 of Seq ID No 265; 2-13 of Seq ID No 266; 4-11, 22-65 and 3-19 of Seq ID No 267; 17-23, 30-35, 39-46, 57-62 and 30-49 of Seq ID No 268; 4-19 and 14-22 of Seq ID No 269; 2-9 of Seq ID No 270; 7-18, 30-43 and 4-12 of Seq ID No 271; 4-30, 39-47 and 5-22 of Seq ID No 272; 6-15 and 14-29 of Seq ID No 273; 4-34 and 23-35 of Seq ID No 274; 4-36, 44-57, 65-72 and 14-27 of Seq ID No 275; 4-18 and 11-20 of Seq ID No 276; 5-19 of Seq ID No 277; 18-36 and 6-20 of Seq ID No 278; 4-10, 19-34,41-84, 96-104 and 50-63 of Seq ID No 279; 4-9, 19-27 and 8-21 of Seq ID No 280; 4-16, 18-28 and 22-30 of Seq ID No 281; 4-15 and 21-35 of Seq ID No 282; 4-17 and 3-13 of Seq ID No 283; 4-12 and 4-18 of Seq ID No 284; 4-24, 31-36 and 29-45 of Seq ID No 285; 12-22, 34-49 and 21-32 of Seq ID No 286; 4-17 and 22-32 of Seq ID No 287; 4-16, 25-42 and 7-28 of Seq ID No 288; 4-10 and 7-20 of Seq ID No 289; 4-11,16-36,39-54 and 28-44 of Seq ID No 290; 5-20, 29-54 and 14-29 of Seq ID No 291; 24-33 and 10-22 of Seq ID No 292; 10-51, 54-61 and 43-64 of Seq ID No 293; 7-13 and 2-17 of Seq ID No 294; 11-20 and 6-20 of Seq ID No 295; 4-30,34-41 and 19-28 of Seq ID No 296; 11-21 of Seq ID No 297; 4-16, 21-26 and 9-38 of Seq ID No 298; 4-12, 15-27, 3042, 66-72 and 10-24 of Seq ID No 299; 8-17 and 11-20 of Seq ID No 300; and 2-19 of Seq ID No246; 1-12 of Seq ID No 247; 21-38 of Seq ID No 248; 2-22 of Seq ID No 254; 15-33 of Seq ID No 255; 11-32 of Seq ID No 256; 11-28 of Seq ID No 259; 10-27 of Seq ID No 260; 9-26 of Seq ID No 261; 4-16 of Seq ID No 263; 1-18 of Seq ID No 266; 12-29 of Seq ID No 273; 6-23 of Seq ID No 276; 1-21 of Seq ID No 277; 47-64 of Seq ID No 279; 28-45 of Seq ID No 285; 18-35 of Seq ID No 287; 14-31 of Seq ID No 291; 7-24 of Seq ID No 292; 8-25 of Seq ID No 299; 1-20 of Seq ID No 300; 18-33 of Seq ID No 151; 62-72 of Seq ID No 151; 118-131 of Seq ID No 152; 195-220 of Seq ID No 154; 215-240 of Seq ID No 154; 255-280 of Seq ID No 154,72-81 of Seq ID No 155; 174-186 of Seq ID No 156; 317-331 of Seq ID No 157; 35-59 of Seq ID No 158; 54-84 of Seq ID No 158; 79-104 of Seq ID No 158; 33-58 of Seq ID No 159; 81-101 of Seq ID No 159; 136-150 of Seq ID No 159; 173-186 of Seq ID No 159; 231-251 of Seq ID No 159; 22-48 of Seq ID No 161; 24-39 of Seq ID No 162; 475-489 of Seq ID No 163; 38-56 of Seq ID No 164; 583-604 of Seq ID No 164; 202-223 of Seq ID No 165; 222-247 of Seq ID No 165; 242-267 of Seq ID No 165; 262-287 of Seq ID No 165; 282-307 of Seq ID No 165; 302-327 of Seq ID No 165; 25-48 of Seq ID No 166; 204-217 of Seq ID No 167; 259-276 of Seq ID No 168; 121-139 of Seq ID No 169; 260-267 of Seq ID No 169; 215-240 of Seq ID No 169; 115-140 of Seq ID No 170; 182-204 of Seq ID No 172; 144-153 of Seq ID No 173; 205-219 of Seq ID No 173; 196-206 of Seq ID No 174; 240-249 of Seq ID No 174; 272-287 of Seq ID No 174; 199-223 of Seq ID No 174; 218-237 of Seq ID No 174; 226-249 of Seq ID No 175; 287-306 of Seq ID No 175; 430-449 of Seq ID No 176; 361-375 of Seq ID No 177; 241-260 of Seq ID No 178; 483-502 of Seq ID No 181; 379-396 of Seq ID No 182; 31-51 of Seq ID No 184; 1436-1460 of Seq ID No 186; 1455-1474 of Seq ID No 186; 1469-1487 of Seq ID No 186; 215-229 of Seq ID No 187; 534-561 of Seq ID No 187; 59-84 of Seq ID No 187; 79-104 of Seq ID No 187; 618-635 of Seq ID No 188; 191-203 of Seq ID No 189; 386-398 of Seq ID No 190; 65-83 of Seq ID No 191; 90-105 of Seq ID No 192; 112-136 of Seq ID No 192; 290-209 of Seq ID No 193; 33-50 of Seq ID No 194; 76-90 of Seq ID No 195; 70-88 of Seq ID No 196; 418-442 of Seq ID No 197; 574-585 of Seq ID No 197; 87-104 of Seq ID No 198; 124-148 of Seq ID No 198; 141-152 of Seq ID No 198; 241-248 of Seq ID No 199; 183-198 of Seq ID No 200; 40-57 of Seq ID No 201; 202-217 of Seq ID No 202; 50-74 of Seq ID No 203; 69-93 of Seq ID No 203; 88-112 of Seq ID No 203; 107-127 of Seq ID No 203; 74-92 of Seq ID No 205; 207-232 of Seq ID No 206; 227-252 of Seq ID No 206; 247-272 of Seq ID No 206; 47-60 of Seq ID No 207; 297-305 of Seq ID No 207; 312-337 of Seq ID No 207; 667-384 of Seq ID No 208; 279-295 of Seq ID No 210; 179-198 of Seq ID No 211; 27-51 of Seq ID No 213; 46-70 of Seq ID No 213; 65-89 of Seq ID No 213; 84-108 of Seq ID No 213; 112-141 of Seq ID No 213; 248-260 of Seq ID No 215; 59-78 of Seq ID No 216; 154-170 of Seq ID No 218; 57-73 of Seq ID No 219; 297-314 of Seq ID No 220; 142-157 of Seq ID No 221; 428-447 of Seq ID No 222; 573-593 of Seq ID No 222; 523-544 of Seq ID No 223; 46-70 of Seq ID No 223; 65-89 of Seq ID No 223; 84-108 of Seq ID No 223; 122-151 of Seq ID No 223; 123-142 of Seq ID No 224; 903-921 of Seq ID No 225; 119-136 of Seq ID No 226; 142-161 of Seq ID No 227; 258-277 of Seq ID No 228; 272-300 of Seq ID No 228; 295-322 of Seq ID No 228; 311-343 of Seq ID No 229; 278-304 of Seq ID No 229; 131-150 of Seq ID No 230; 195-218 of Seq ID No 230; 53-70 of Seq ID No 231; 184-208 of Seq ID No 232; 222-246 of Seq ID No 232; 241-265 of Seq ID No 232; 260-284 of Seq ID No 232; 279-303 of Seq ID No 232; 317-341 of Seq ID No 232; 678-696 of Seq ID No 233; 88-114 of Seq ID No 235; 464481 of Seq ID No 235; 153-172 of Seq ID No 236; 137-155,166-184 of Seq ID No 236; 215-228 of Seq ID No 236; 37-51 of Seq ID No 237; 53-75 of Seq ID No 237; 232-251 of Seq ID No 237; 318-336 of Seq ID No 237; 305-315 of Seq ID No 238; 131-156 of Seq ID No 238; 258-275 of Seq ID No 241; 107-137 of Seq ID No 243; 138-162 of Seq ID No 243; 157-181 of Seq ID No 243; 195-227 of Seq ID No 243; 62-78 of Seq ID No 244; 567-584 of Seq ID No 245, and fragments comprising at least 6, preferably more than 8, especially more than 10 aa of said sequences. All these fragments individually and each independently form a preferred selected aspect of the present invention.

[0180] All linear hyperimmune serum reactive fragments of a particular antigen may be identified by analysing the entire sequence of the protein antigen by a set of peptides overlapping by 1 amino acid with a length of at least 10 amino acids. Subsequently, non-linear epitopes can be identified by analysis of the protein antigen with hyperimmune sera using the expressed full-length protein or domain polypeptides thereof. Assuming that a distinct domain of a protein is sufficient to form the 3D structure independent from the native protein, the analysis of the respective recombinant or synthetically produced domain polypeptide with hyperimmune serum would allow the identification of conformational epitopes within the individual domains of multi-domain proteins. For those antigens where a domain possesses linear as well as conformational epitopes, competition experiments with peptides corresponding to the linear epitopes may be used to confirm the presence of conformational epitopes.

[0181] It will be appreciated that the invention also relates to, among others, nucleic acid molecules encoding the aforementioned fragments, nucleic acid molecules that hybridise to nucleic acid molecules encoding the fragments, particularly those that hybridise under stringent conditions, and nucleic acid molecules, such as PCR primers, for amplifying nucleic acid molecules that encode the fragments. In these regards, preferred nucleic acid molecules are those that correspond to the preferred fragments, as discussed above.

[0182] The present invention also relates to vectors which comprise a nucleic acid molecule or nucleic acid molecules of the present invention, host cells which are genetically engineered with vectors of the invention and the production of hyperimmune serum reactive antigens and fragments thereof by recombinant techniques.

[0183] A great variety of expression vectors can be used to express a hyperimmune serum reactive antigen or fragment thereof according to the present invention. Generally, any vector suitable to maintain, propagate or express nucleic acids to express a polypeptide in a host may be used for expression in this regard. In accordance with this aspect of the invention the vector may be, for example, a plasmid vector, a single or double-stranded phage vector, a single or double-stranded RNA or DNA viral vector. Starting plasmids disclosed herein are either commercially available, publicly available, or can be constructed from available plasmids by routine application of well-known, published procedures. Preferred among vectors, in certain respects, are those for expression of nucleic acid molecules and hyperimmune serum reactive antigens or fragments thereof of the present invention. Nucleic acid constructs in host cells can be used in a conventional manner to produce the gene product encoded by the recombinant sequence. Alternatively, the hyperimmune serum reactive antigens and fragments thereof of the invention can be synthetically produced by conventional peptide synthesizers. Mature proteins can be expressed in mammalian cells, yeast, bacteria, or other cells under the control of appropriate promoters. Cell-free translation systems can also be employed to produce such proteins using RNAs derived from the DNA construct of the present invention.

[0184] Host cells can be genetically engineered to incorporate nucleic acid molecules and express nucleic acid molecules of the present invention. Representative examples of appropriate hosts include bacterial cells, such as streptococci, staphylococci, E. coli, Streptomyces and Bacillus subtillis cells; fungal cells, such as yeast cells and Aspergillus cells; insect cells such as Drosophila S2 and Spodoptera Sf9 cells; animal cells such as CHO, COS, Hela, C127, 3T3, BHK, 293 and Bowes melanoma cells; and plant cells.

[0185] The invention also provides a process for producing a S. pyogenes hyperimmune serum reactive antigen and a fragment thereof comprising expressing from the host cell a hyperimmune serum reactive antigen or fragment thereof encoded by the nucleic acid molecules provided by the present invention. The invention further provides a process for producing a cell, which expresses a S. pyogenes hyperimmune serum reactive antigen or a fragment thereof comprising transforming or transfecting a suitable host cell with the vector according to the present invention such that the transformed or transfected cell expresses the polypeptide encoded by the nucleic add contained in the vector.

[0186] The polypeptide may be expressed in a modified form, such as a fusion protein, and may include not only secretion signals but also additional heterologous functional regions. Thus, for instance, a region of additional amino adds, particularly charged amino adds, may be added to the N— or C-terminus of the polypeptide to improve stability and persistence in the host cell, during purification or during subsequent handling and storage. Also, regions may be added to the polypeptide to facilitate purification. Such regions may be removed prior to final preparation of the polypeptide. The addition of peptide moieties to polypeptides to engender secretion or excretion, to improve stability or to facilitate purification, among others, are familiar and routine techniques in the art. A preferred fusion protein comprises a heterologous region from immunoglobulin that is useful to solubilize or purify polypeptides. For example, EP-A-O 464 533 (Canadian counterpart 2045869) discloses fusion proteins comprising various portions of constant region of immunoglobin molecules together with another protein or part thereof. In drug discovery, for example, proteins have been fused with antibody Fc portions for the purpose of high-throughout screening assays to identify antagonists. See for example, {Bennett, D. et al., 1995} and (Johanson, K. et al., 19951.

[0187] The S. pyogenes hyperimmune serum reactive antigen or a fragment thereof can be recovered and purified from recombinant cell cultures by well-known methods including ammonium sulfate or ethanol precipitation, add extraction, anion or cation exchange chromatography, phosphocellulose chromatography, hydrophobic interaction chromatography, hydroxylapatite chromatography and lectin chromatography.

[0188] The hyperimmune serum reactive antigens and fragments thereof according to the present invention can be produced by chemical synthesis as well as by biotechnological means. The latter comprise the transfection or transformation of a host cell with a vector containing a nucleic acid according to the present invention and the cultivation of the transfected or transformed host cell under conditions which are known to the ones skilled in the art. The production method may also comprise a purification step in order to purify or isolate the polypeptide to be manufactured. In a preferred embodiment the vector is a vector according to the present invention.

[0189] The hyperimmune serum reactive antigens and fragments thereof according to the present invention may be used for the detection of the organism or organisms in a sample containing these organisms or polypeptides derived thereof. Preferably such detection is for diagnosis, more preferable for the diagnosis of a disease, most preferably for the diagnosis of a diseases related or linked to the presence or abundance of Gram-positive bacteria, especially bacteria selected from the group comprising streptococci, staphylococci and lactococci. More preferably, the microorganisms are selected from the group comprising Streptococcus agalactiae, Streptococcus pneumoniae and Streptococcus mutans, especially the microorganism is Streptococcus pyogenes.

[0190] The present invention also relates to diagnostic assays such as quantitative and diagnostic assays for detecting levels of the hyperimmune serum reactive antigens and fragments thereof of the present invention in cells and tissues, including determination of normal and abnormal levels. Thus, for instance, a diagnostic assay in accordance with the invention for detecting over-expression of the polypeptide compared to normal control tissue samples may be used to detect the presence of an infection, for example, and to identify the infecting organism. Assay techniques that can be used to determine levels of a polypeptide, in a sample derived from a host are well-known to those of skill in the art. Such assay methods include radioimmunoassays, competitive-binding assays, Western Blot analysis and ELISA assays. Among these, ELISAs frequently are preferred. An ELISA assay initially comprises preparing an antibody specific to the polypeptide, preferably a monoclonal antibody. In addition, a reporter antibody generally is prepared which binds to the monoclonal antibody. The reporter antibody is attached to a detectable reagent such as radioactive, fluorescent or enzymatic reagent, such as horseradish peroxidase enzyme.

[0191] The hyperimmune serum reactive antigens and fragments thereof according to the present invention may also be used for the purpose of or in connection with an array. More particularly, at least one of the hyperimmune serum reactive antigens and fragments thereof according to the present invention may be immobilized on a support. Said support typically comprises a variety of hyperimmune serum reactive antigens and fragments thereof whereby the variety may be created by using one or several of the hyperimmune serum reactive antigens and fragments thereof according to the present invention and/or hyperimmune serum reactive antigens and fragments thereof being different. The characterizing feature of such array as well as of any array in general is the fact that at a distinct or predefined region or position on said support or a surface thereof, a distinct polypeptide is immobilized. Because of this any activity at a distinct position or region of an array can be correlated with a specific polypeptide. The number of different hyperimmune serum reactive antigens and fragments thereof immobilized on a support may range from as little as 10 to several 1000 different hyperimmune serum reactive antigens and fragments thereof. The density of hyperimmune serum reactive antigens and fragments thereof per cm² is in a preferred embodiment as little as 10 peptides/polypeptides per cm² to at least 400 different peptides/polypeptides per cm² and more particularly at least 1000 different hyperimmune serum reactive antigens and fragments thereof per cm².

[0192] The manufacture of such arrays is known to the one skilled in the art and, for example, described in U.S. Pat. No. 5,744,309. The array preferably comprises a planar, porous or non-porous solid support having at least a first surface. The hyperimmune serum reactive antigens and fragments thereof as disclosed herein, are immobilized on said surface. Preferred support materials are, among others, glass or cellulose. It is also within the present invention that the array is used for any of the diagnostic applications described herein. Apart from the hyperimmune serum reactive antigens and fragments thereof according to the present invention also the nucleic acid molecules according to the present invention may be used for the generation of an array as described above. This applies as well to an array made of antibodies, preferably monoclonal antibodies as, among others, described herein.

[0193] In a further aspect the present invention relates to an antibody directed to any of the hyperimmune serum reactive antigens and fragments thereof, derivatives or fragments thereof according to the present invention. The present invention includes, for example, monoclonal and polyclonal antibodies, chimeric, single chain, and humanized antibodies, as well as Fab fragments, or the product of a Fab expression library. It is within the present invention that the antibody may be chimeric, i.e. that different parts thereof stem from different species or at least the respective sequences are taken from different species.

[0194] Antibodies generated against the hyperimmune serum reactive antigens and fragments thereof corresponding to a sequence of the present invention can be obtained by direct injection of the hyperimmune serum reactive antigens and fragments thereof into an animal or by administering the hyperimmune serum reactive antigens and fragments thereof to an animal, preferably a non-human. The antibody so obtained will then bind the hyperimmune serum reactive antigens and fragments thereof itself. In this manner, even a sequence encoding only a fragment of a hyperimmune serum reactive antigen and fragments thereof can be used to generate antibodies binding the whole native hyperimmune serum reactive antigen and fragments thereof. Such antibodies can then be used to isolate the hyperimmune serum reactive antigens and fragments thereof from tissue expressing those hyperimmune serum reactive antigens and fragments thereof.

[0195] For preparation of monoclonal antibodies, any technique known in the art which provides antibodies produced by continuous cell line cultures can be used. (as described originally in {Kohler, G. et al., 1975}.

[0196] Techniques described for the production of single chain antibodies (U.S. Pat. No. 4,946,778) can be adapted to produce single chain antibodies to immunogenic hyperimmune serum reactive antigens and fragments thereof according to this invention. Also, transgenic mice, or other organisms such as other mammals, may be used to express humanized antibodies to immunogenic hyperimmune serum reactive antigens and fragments thereof according to this invention.

[0197] Alternatively, phage display technology or ribosomal display could be utilized to select antibody genes with binding activities towards the hyperimmune serum reactive antigens and fragments thereof either from repertoires of PCR amplified v-genes of lymphocytes from humans screened for possessing respective target antigens or from naïve libraries {McCafferty, J. et al., 1990}; {Marks, J. et al., 1992}. The affinity of these antibodies can also be improved by chain shuffling {Clackson, T. et al., 1991}.

[0198] If two antigen binding domains are present, each domain may be directed against a different epitope—termed ‘bispecific’ antibodies.

[0199] The above-described antibodies may be employed to isolate or to identify clones expressing the hyperimmune serum reactive antigens and fragments thereof or purify the hyperimmune serum reactive antigens and fragments thereof of the present invention by attachment of the antibody to a solid support for isolation and/or purification by affinity chromatography.

[0200] Thus, among others, antibodies against the hyperimmune serum reactive antigens and fragments thereof of the present invention may be employed to inhibit and/or treat infections, particularly bacterial infections and especially infections arising from S. pyogenes.

[0201] Hyperimmune serum reactive antigens and fragments thereof include antigenically, epitopically or immunologically equivalent derivatives which form a particular aspect of this invention. The term “antigenically equivalent derivative” as used herein encompasses a hyperimmune serum reactive antigen and fragments thereof or its equivalent which will be specifically recognized by certain antibodies which, when raised to the protein or hyperimmune serum reactive antigen and fragments thereof according to the present invention, interfere with the interaction between pathogen and mammalian host. The term “immunologically equivalent derivative” as used herein encompasses a peptide or its equivalent which when used in a suitable formulation to raise antibodies in a vertebrate, the antibodies act to interfere with the interaction between pathogen and mammalian host.

[0202] The hyperimmune serum reactive antigens and fragments thereof, such as an antigenically or immunologically equivalent derivative or a fusion protein thereof can be used as an antigen to immunize a mouse or other animal such as a rat or chicken. The fusion protein may provide stability to the hyperimmune serum reactive antigens and fragments thereof. The antigen may be associated, for example by conjugation, with an immunogenic carrier protein, for example bovine serum albumin (BSA) or keyhole limpet haemocyanin (KLH). Alternatively, an antigenic peptide comprising multiple copies of the protein or hyperimmune serum reactive antigen and fragments thereof, or an antigenically or immunologically equivalent hyperimmune serum reactive antigen and fragments thereof, may be sufficiently antigenic to improve immunogenicity so as to obviate the use of a carrier.

[0203] Preferably the antibody or derivative thereof is modified to make it less immunogenic in the individual. For example, if the individual is human the antibody may most preferably be “humanized”, wherein the complimentarily determining region(s) of the hybridoma-derived antibody has been transplanted into a human monoclonal antibody, for example as described in {Jones, P. et al., 1986} or {Tempest, P. et al., 1991}.

[0204] The use of a polynucleotide of the invention in genetic immunization will preferably employ a suitable delivery method such as direct injection of plasmid DNA into muscle, delivery of DNA complexed with specific protein carriers, coprecipitation of DNA with calcium phosphate, encapsulation of DNA in various forms of liposomes, particle bombardment {Tang, D. et al., 1992}, {Eisenbraun, M. et al., 1993} and in vivo infection using cloned retroviral vectors {Seeger, C. et al., 1984}.

[0205] In a further aspect the present invention relates to a peptide binding to any of the hyperimmune serum reactive antigens and fragments thereof according to the present invention, and a method for the manufacture of such peptides whereby the method is characterized by the use of the hyperimmune serum reactive antigens and fragments thereof according to the present invention and the basic steps are known to the one skilled in the art.

[0206] Such peptides may be generated by using methods according to the state of the art such as phage display or ribosome display. In case of phage display, basically a library of peptides is generated, in form of phages, and this kind of library is contacted with the target molecule, in the present case a hyperimmune serum reactive antigen and fragments thereof according to the present invention. Those peptides binding to the target molecule are subsequently removed, preferably as a complex with the target molecule, from the respective reaction. It is known to the one skilled in the art that the binding characteristics, at least to a certain extent, depend on the particularly realized experimental set-up such as the salt concentration and the like. After separating those peptides binding to the target molecule with a higher affinity or a bigger force, from the non-binding members of the library, and optionally also after removal of the target molecule from the complex of target molecule and peptide, the respective peptide(s) may subsequently be characterised. Prior to the characterisation optionally an amplification step is realized such as, e. g. by propagating the peptide coding phages. The characterisation preferably comprises the sequencing of the target binding peptides. Basically, the peptides are not limited in their lengths, however, preferably peptides having a lengths from about 8 to 20 amino adds are preferably obtained in the respective methods. The size of the libraries may be about 10² to 10¹⁸, preferably 10⁸ to 10¹⁵ different peptides, however, is not limited thereto.

[0207] A particular form of target binding hyperimmune serum reactive antigens and fragments thereof are the so-called “anticalines” which are, among others, described in German patent application DE 197 42 706.

[0208] In a further aspect the present invention relates to functional nucleic acids interacting with any of the hyperimmune serum reactive antigens and fragments thereof according to the present invention, and a method for the manufacture of such functional nucleic adds whereby the method is characterized by the use of the hyperimmune serum reactive antigens and fragments thereof according to the present invention and the basic steps are known to the one skilled in the art. The functional nucleic acids are preferably aptamers and spiegelmers.

[0209] Aptamers are D-nucleic acids which are either single stranded or double stranded and which specifically interact with a target molecule. The manufacture or selection of aptamers is, e. g., described in European patent EP 0 533 838. Basically the following steps are realized. First, a mixture of nucleic acids, i. e. potential aptamers, is provided whereby each nucleic acid typically comprises a segment of several, preferably at least eight subsequent randomised nucleotides. This mixture is subsequently contacted with the target molecule whereby the nucleic acid(s) bind to the target molecule, such as based on an increased affinity towards the target or with a bigger force thereto, compared to the candidate mixture. The binding nucleic acid(s) are/is subsequently separated from the remainder of the mixture. Optionally, the thus obtained nucleic acid(s) is amplified using, e.g. polymerase chain reaction. These steps may be repeated several times giving at the end a mixture having an increased ratio of nucleic acids specifically binding to the target from which the final binding nucleic acid is then optionally selected. These specifically binding nucleic acid(s) are referred to aptamers. It is obvious that at any stage of the method for the generation or identification of the aptamers samples of the mixture of individual nucleic acids may be taken to determine the sequence thereof using standard techniques. It is within the present invention that the aptamers may be stabilized such as, e. g., by introducing defined chemical groups which are known to the one skilled in the art of generating aptamers. Such modification may for example reside in the introduction of an amino group at the 2′-position of the sugar moiety of the nucleotides. Aptamers are currently used as therapeutical agens. However, it is also within the present invention that the thus selected or generated aptamers may be used for target validation and/or as lead substance for the development of medicaments, preferably of medicaments based on small molecules. This is actually done by a competition assay whereby the specific interaction between the target molecule and the aptamer is inhibited by a candidate drug whereby upon replacement of the aptamer from the complex of target and aptamer it may be assumed that the respective drug candidate allows a specific inhibition of the interaction between target and aptamer, and if the interaction is specific, said candidate drug will, at least in principle, be suitable to block the target and thus decrease its biological availability or activity in a respective system comprising such target. The thus obtained small molecule may then be subject to further derivatisation and modification to optimise its physical, chemical, biological and/or medical characteristics such as toxicity, specificity, biodegradability and bioavailability.

[0210] Spiegelmers and their generation or manufacture is based on a similar principle. The manufacture of spiegelmers is described in international patent application WO 98/08856. Spiegelmers are L-nucleic acids, which means that they are composed of L-nucleotides rather than D-nucleotides as aptamers are. Spiegelmers are characterized by the fact that they have a very high stability in biological system and, comparable to aptamers, specifically interact with the target molecule against which they are directed. In the process of generating spiegelmers, a heterogonous population of D-nucleic acids is created and this population is contacted with the optical antipode of the target molecule, in the present case for example with the D-enantiomer of the naturally occurring L-enantiomer of the hyperimmune serum reactive antigens and fragments thereof according to the present invention. Subsequently, those D-nucleic acids are separated which do not interact with the optical antipode of the target molecule. But those D-nucleic acids interacting with the optical antipode of the target molecule are separated, optionally determined and/or sequenced and subsequently the corresponding L-nucleic acids are synthesized based on the nucleic acid sequence information obtained from the D-nucleic acids. These L-nucleic acids which are identical in terms of sequence with the aforementioned D-nucleic acids interacting with the optical antipode of the target molecule, will specifically interact with the naturally occurring target molecule rather than with the optical antipode thereof. Similar to the method for the generation of aptamers it is also possible to repeat the various steps several times and thus to enrich those nucleic acids specifically interacting with the optical antipode of the target molecule.

[0211] In a further aspect the present invention relates to functional nucleic acids interacting with any of the nucleic acid molecules according to the present invention, and a method for the manufacture of such functional nucleic acids whereby the method is characterized by the use of the nucleic acid molecules and their respective sequences according to the present invention and the basic steps are known to the one skilled in the art. The functional nucleic acids are preferably ribozymes, antisense oligonucleotides and siRNA.

[0212] Ribozymes are catalytically active nucleic acids which preferably consist of RNA which basically comprises two moieties. The first moiety shows a catalytic activity whereas the second moiety is responsible for the specific interaction with the target nucleic acid, in the present case the nucleic acid coding for the hyperimmune serum reactive antigens and fragments thereof according to the present invention. Upon interaction between the target nucleic acid and the second moiety of the ribozyme, typically by hybridisation and Watson-Crick base pairing of essentially complementary stretches of bases on the two hybridising strands, the catalytically active moiety may become active which means that it catalyses, either intramolecularly or intermolecularly, the target nucleic acid in case the catalytic activity of the ribozyme is a phosphodiesterase activity. Subsequently, there may be a further degradation of the target nucleic acid which in the end results in the degradation of the target nucleic acid as well as the protein derived from the said target nucleic acid. Ribozymes, their use and design principles are known to the one skilled in the art, and, for example described in {Doherty, E. et al., 2001} and {Lewin, A. et al., 2001}.

[0213] The activity and design of antisense oligonudeotides for the manufacture of a medicament and as a diagnostic agent, respectively, is based on a similar mode of action. Basically, antisense oligonudeotides hybridise based on base complementarity, with a target RNA, preferably with a mRNA, thereby activate RNase H. RNase H is activated by both phosphodiester and phosphorothioate-coupled DNA. Phosphodiester-coupled DNA, however, is rapidly degraded by cellular nucleases with the exception of phosphorothioate-coupled DNA. These resistant, non-naturally occurring DNA derivatives do not inhibit RNase H upon hybridisation with RNA. In other words, antisense polynucleotides are only effective as DNA RNA hybride complexes. Examples for this kind of antisense oligonudeotides are described, among others, in U.S. Pat. No. 5,849,902 and U.S. Pat. No. 5,989,912. In other words, based on the nucleic add sequence of the target molecule which in the present case are the nucleic acid molecules for the hyperimmune serum reactive antigens and fragments thereof according to the present invention, either from the target protein from which a respective nucleic add sequence may in principle be deduced, or by knowing the nucleic add sequence as such, particularly the mRNA, suitable antisense oligonudeotides may be designed base on the principle of base complementarity.

[0214] Particularly preferred are antisense-oligonudeotides which have a short stretch of phosphorothioate DNA (3 to 9 bases). A minimum of 3 DNA bases is required for activation of bacterial RNase H and a minimum of 5 bases is required for mammalian RNase H activation. In these chimeric oligonucleotides there is a central region that forms a substrate for RNase H that is flanked by hybridising “arms” comprised of modified nucleotides that do not form substrates for RNase H. The hybridising arms of the chimeric oligonucleotides may be modified such as by 2′-O-methyl or 2′-fluoro. Alternative approaches used methylphosphonate or phosphoramidate linkages in said arms. Further embodiments of the antisense oligonudeotide useful in the practice of the present invention are P-methoxyoligonucleotides, partial P-methoxyoligodeoxyribonucleotides or P-methoxyoligonucleotides.

[0215] Of particular relevance and usefulness for the present invention are those antisense oligonucleotides as more particularly described in the above two mentioned US patents. These oligonucleotides contain no naturally occurring 5′→3′-linked nucleotides. Rather the oligonucdeotides have two types of nucleotides: 2′-deoxyphosphorothioate, which activate RNase H, and 2′-modified nucleotides, which do not. The linkages between the 2′-modified nucleotides can be phosphodiesters, phosphorothioate or P-ethoxyphosphodiester. Activation of RNase H is accomplished by a contiguous RNase H-activating region, which contains between 3 and 5 2′-deoxyphosphorothioate nucleotides to activate bacterial RNase H and between 5 and 10 2′-deoxyphosphorothioate nucleotides to activate eucaryotic and, particularly, mammalian RNase H. Protection from degradation is accomplished by making the 5′ and 3′ terminal bases highly nuclease resistant and, optionally, by placing a 3′ terminal blocking group.

[0216] More particularly, the antisense oligonucleotide comprises a 5′ terminus and a 3′ terminus; and from 11 to 59 5′→3′-linked nucleotides independently selected from the group consisting of 2′-modified phosphodiester nucleotides and 2′-modified P-alkyloxyphosphotriester nucleotides; and wherein the 5′-terminal nucleoside is attached to an RNase H-activating region of between three and ten contiguous phosphorothioate-linked deoxyribonucleotides, and wherein the 3′-terminus of said oligonucleotide is selected from the group consisting of an inverted deoxyribonucleotides, a contiguous stretch of one to three phosphorothioate 2′-modified ribonucleotides, a biotin group and a P-alkyloxyphosphotriester nucleotide.

[0217] Also an antisense oligonudeotide may be used wherein not the 5′terminal nucleoside is attached to an RNase H-activating region but the 3′ terminal nucleoside as specified above. Also, the 5′ terminus is selected from the particular group rather than the 3′ terminus of said oligonucleotide.

[0218] The nucleic adds as well as the hyperimmune serum reactive antigens and fragments thereof according to the present invention may be used as or for the manufacture of pharmaceutical compositions, especially vaccines. Preferably such pharmaceutical composition, preferably vaccine is for the prevention or treatment of diseases caused by, related to or associated with S. pyogenes. In so far another aspect of the invention relates to a method for inducing an immunological response in an individual, particularly a mammal, which comprises inoculating the individual with the hyperimmune serum reactive antigens and fragments thereof of the invention, or a fragment or variant thereof, adequate to produce antibodies to protect said individual from infection, particularly Streptococcus infection and most particularly S. pyogenes infections.

[0219] Yet another aspect of the invention relates to a method of inducing an immunological response in an individual which comprises, through gene therapy or otherwise, delivering a nucleic acid functionally encoding hyperimmune serum reactive antigens and fragments thereof, or a fragment or a variant thereof, for expressing the hyperimmune serum reactive antigens and fragments thereof, or a fragment or a variant thereof in vivo in order to induce an immunological response to produce antibodies or a cell mediated T cell response, either cytokine-producing T cells or cytotoxic T cells, to protect said individual from disease, whether that disease is already established within the individual or not. One way of administering the gene is by accelerating it into the desired cells as a coating on particles or otherwise.

[0220] A further aspect of the invention relates to an immunological composition which, when introduced into a host capable of having induced within it an immunological response, induces an immunological response in such host, wherein the composition comprises recombinant DNA which codes for and expresses an antigen of the hyperimmune serum reactive antigens and fragments thereof of the present invention. The immunological response may be used therapeutically or prophylactically and may take the form of antibody immunity or cellular immunity such as that arising from CTL or CD4+ T cells.

[0221] The hyperimmune serum reactive antigens and fragments thereof of the invention or a fragment thereof may be fused with a co-protein which may not by itself produce antibodies, but is capable of stabilizing the first protein and producing a fused protein which will have immunogenic and protective properties. This fused recombinant protein preferably further comprises an antigenic co-protein, such as Glutathione-S-transferase (GST) or beta-galactosidase, relatively large co-proteins which solubilise the protein and facilitate production and purification thereof. Moreover, the co-protein may act as an adjuvant in the sense of providing a generalized stimulation of the immune system. The co-protein may be attached to either the amino or carboxy terminus of the first protein.

[0222] Also, provided by this invention are methods using the described nucleic acid molecule or particular fragments thereof in such genetic immunization experiments in animal models of infection with S. pyogenes. Such fragments will be particularly useful for identifying protein epitopes able to provoke a prophylactic or therapeutic immune response. This approach can allow for the subsequent preparation of monoclonal antibodies of particular value from the requisite organ of the animal successfully resisting or clearing infection for the development of prophylactic agents or therapeutic treatments of S. pyogenes infection in mammals, particularly humans.

[0223] The hyperimmune serum reactive antigens and fragments thereof may be used as an antigen for vaccination of a host to produce specific antibodies which protect against invasion of bacteria, for example by blocking adherence of bacteria to damaged tissue. Examples of tissue damage include wounds in skin or connective tissue caused e.g. by mechanical, chemical or thermal damage or by implantation of indwelling devices, or wounds in the mucous membranes, such as the mouth, mammary glands, urethra or vagina.

[0224] The present invention also includes a vaccine formulation which comprises the immunogenic recombinant protein together with a suitable carrier. Since the protein may be broken down in the stomach, it is preferably administered parenterally, including, for example, administration that is subcutaneous, intramuscular, intravenous, or intradermal. Formulations suitable for parenteral administration include aqueous and non-aqueous sterile injection solutions which may contain anti-oxidants, buffers, bacteriostats and solutes which render the formulation isotonic with the bodily fluid, preferably the blood, of the individual; and aqueous and non-aqueous sterile suspensions which may include suspending agents or thickening agents. The formulations may be presented in unit-dose or multi-dose containers, for example, sealed ampoules and vials, and may be stored in a freeze-dried condition requiring only the addition of the sterile liquid carrier immediately prior to use. The vaccine formulation may also include adjuvant systems for enhancing the immunogenicity of the formulation, such as oil-in-water systems and other systems known in the art. The dosage will depend on the specific activity of the vaccine and can be readily determined by routine experimentation.

[0225] According to another aspect, the present invention relates to a pharmaceutical composition comprising such a hyperimmune serum-reactive antigen or a fragment thereof as provided in the present invention for S. pyogenes. Such a pharmaceutical composition may comprise one or more hyperimmune serum reactive antigens or fragments thereof against S. pyogenes. Optionally, such S. pyogenes hyperimmune serum reactive antigens or fragments thereof may also be combined with antigens against other pathogens in a combination pharmaceutical composition. Preferably, said pharmaceutical composition is a vaccine for preventing or treating an infection caused by S. pyogenes and/or other pathogens against which the antigens have been included in the vaccine.

[0226] According to a further aspect, the present invention relates to a pharmaceutical composition comprising a nucleic acid molecule encoding a hyperimmune serum-reactive antigen or a fragment thereof as identified above for S. pyogenes. Such a pharmaceutical composition may comprise one or more nucleic acid molecules encoding hyperimmune serum reactive antigens or fragments thereof against S. pyogenes. Optionally, such S. pyogenes nucleic acid molecules encoding hyperimmune serum reactive antigens or fragments thereof may also be combined with nucleic acid molecules encoding antigens against other pathogens in a combination pharmaceutical composition. Preferably, said pharmaceutical composition is a vaccine for preventing or treating an infection caused by S. pyogenes and/or other pathogens against which the antigens have been included in the vaccine.

[0227] The pharmaceutical composition may contain any suitable auxiliary substances, such as buffer substances, stabilisers or further active ingredients, especially ingredients known in connection of pharmaceutical composition and/or vaccine production.

[0228] A preferable carrier/or excipient for the hyperimmune serum-reactive antigens, fragments thereof or a coding nucleic acid molecule thereof according to the present invention is an immunostimulatory compound for further stimulating the immune response to the given hyperimmune serum-reactive antigen, fragment thereof or a coding nucleic acid molecule thereof. Preferably the immunostimulatory compound in the pharmaceutical preparation according to the present invention is selected from the group of polycationic substances, especially polycationic peptides, immunostimulatory nucleic acids molecules, preferably immunostimulatory deoxynucleotides, alum, Freund's complete adjuvants, Freund's incomplete adjuvants, neuroactive compounds, especially human growth hormone, or combinations thereof.

[0229] It is also within the scope of the present invention that the pharmaceutical composition, especially vaccine, comprises apart from the hyperimmune serum reactive antigens, fragments thereof and/or coding nucleic acid molecules thereof according to the present invention other compounds which are biologically or pharmaceutically active. Preferably, the vaccine composition comprises at least one polycationic peptide. The polycationic compound(s) to be used according to the present invention may be any polycationic compound which shows the characteristic effects according to the WO 97/30721. Preferred polycationic compounds are selected from basic polypeptides, organic polycations, basic polyamino acids or mixtures thereof. These polyamino acids should have a chain length of at least 4 amino acid residues (WO 97/30721). Especially preferred are substances like polylysine, polyarginine and polypeptides containing more than 20%, especially more than 50% of basic amino acids in a range of more than 8, especially more than 20, amino acid residues or mixtures thereof. Other preferred polycations and their pharmaceutical compositions are described in WO 97/30721 (e.g. polyethyleneimine) and WO 99/38528. Preferably these polypeptides contain between 20 and 500 amino acid residues, especially between 30 and 200 residues.

[0230] These polycationic compounds may be produced chemically or recombinantly or may be derived from natural sources.

[0231] Cationic (poly)peptides may also be anti-microbial with properties as reviewed in {Ganz, T., 1999}. These (poly)peptides may be of prokaryotic or animal or plant origin or may be produced chemically or recombinantly (WO 02/13857). Peptides may also belong to the class of defensins (WO 02/13857). Sequences of such peptides can be, for example, be found in the Antimicrobial Sequences Database under the following internet address:
[0232] http://www.bbcm.univ.trieste.it/˜tossi/pag2.html

[0233] Such host defence peptides or defensives are also a preferred form of the polycationic polymer according to the present invention. Generally, a compound allowing as an end product activation (or down-regulation) of the adaptive immune system, preferably mediated by APCs (including dendritic cells) is used as polycationic polymer.

[0234] Especially preferred for use as polycationic substances in the present invention are cathelicidin derived antimicrobial peptides or derivatives thereof (International patent application WO 02/13857, incorporated herein by reference), especially antimicrobial peptides derived from mammal cathelicidin, preferably from human, bovine or mouse.

[0235] Polycationic compounds derived from natural sources include HIV-REV or HIV-TAT (derived cationic peptides, antennapedia peptides, chitosan or other derivatives of chitin) or other peptides derived from these peptides or proteins by biochemical or recombinant production. Other preferred polycationic compounds are cathelin or related or derived substances from cathelin. For example, mouse cathelin is a peptide which has the amino acid sequence NH₂-RLAGLLRKGGEKIGEKLKUIGOKIKNFFQKLVPQPE-COOH. Related or derived cathelin substances contain the whole or parts of the cathelin sequence with at least 15-20 amino acid residues. Derivations may include the substitution or modification of the natural amino acids by amino acids which are not among the 20 standard amino acids. Moreover, further cationic residues may be introduced into such cathelin molecules. These cathelin molecules are preferred to be combined with the antigen. These cathelin molecules surprisingly have turned out to be also effective as an adjuvant for a antigen without the addition of further adjuvants. It is therefore possible to use such cathelin molecules as efficient adjuvants in vaccine formulations with or without further immunactivating substances.

[0236] Another preferred polycationic substance to be used according to the present invention is a synthetic peptide containing at least 2 KLK-motifs separated by a linker of 3 to 7 hydrophobic amino acids (International patent application WO 02/32451, incorporated herein by reference).

[0237] The pharmaceutical composition of the present invention may further comprise immunostimulatory nucleic acid(s). Immunostimulatory nucleic acids are e. g. neutral or artificial CpG containing nucleic acid, short stretches of nucleic acid derived from non-vertebrates or in form of short oligonucleotides (ODNs) containing non-methylated cytosine-guanine di-nucleotides (CpG) in a certain base context (e.g. described in WO 96/02555). Alternatively, also nucleic acids based on inosine and cytidine as e.g. described in the WO 01/93903, or deoxynucleic acids containing deoxy-inosine and/or deoxyuridine residues (described in WO 01/93905 and PCT/EP 02/05448, incorporated herein by reference) may preferably be used as immunostimulatory nucleic acids for the present invention. Preferably, the mixtures of different immunostimulatory nucleic acids may be used according to the present invention.

[0238] It is also within the present invention that any of the aforementioned polycationic compounds is combined with any of the immunostimulatory nucleic adds as aforementioned. Preferably, such combinations are according to the ones as described in WO 01/93905, WO 02132451, WO 01/54720, WO 01/93903, WO 02/13857 and PCT/EP 02/05448 and the Austrian patent application A 1924/2001, incorporated herein by reference.

[0239] In addition or alternatively such vaccine composition may comprise apart from the hyperimmune serum reactive antigens and fragments thereof, and the coding nucleic acid molecules thereof according to the present invention a neuroactive compound. Preferably, the neuroactive compound is human growth factor as, e.g. described in WO 01/24822. Also preferably, the neuroactive compound is combined with any of the polycationic compounds and/or immunostimulatory nucleic acids as afore-mentioned.

[0240] In a further aspect the present invention is related to a pharmaceutical composition. Such pharmaceutical composition is, for example, the vaccine described herein. Also a pharmaceutical composition is a pharmaceutical composition which comprises any of the following compounds or combinations thereof: the nucleic acid molecules according to the present invention, the hyperimmune serum reactive antigens and fragments thereof according to the present invention, the vector according to the present invention, the cells according to the present invention, the antibody according to the present invention, the functional nucleic acids according to the present invention and the binding peptides such as the anticalines according to the present invention, any agonists and antagonists screened as described herein. In connection therewith any of these compounds may be employed in combination with a non-sterile or sterile carrier or carriers for use with cells, tissues or organisms, such as a pharmaceutical carrier suitable for administration to a subject. Such compositions comprise, for instance, a media additive or a therapeutically effective amount of a hyperimmune serum reactive antigen and fragments thereof of the invention and a pharmaceutically acceptable carrier or excipient. Such carriers may include, but are not limited to, saline, buffered saline, dextrose, water, glycerol, ethanol and combinations thereof. The formulation should suit the mode of administration.

[0241] The pharmaceutical compositions may be administered in any effective, convenient manner including, for instance, administration by topical, oral, anal, vaginal, intravenous, intraperitoneal, intramuscular, subcutaneous, intranasal or intradermal routes among others.

[0242] In therapy or as a prophylactic, the active agent may be administered to an individual as an injectable composition, for example as a sterile aqueous dispersion, preferably isotonic.

[0243] Alternatively the composition may be formulated for topical application, for example in the form of ointments, creams, lotions, eye ointments, eye drops, ear drops, mouthwash, impregnated dressings and sutures and aerosols, and may contain appropriate conventional additives, including, for example, preservatives, solvents to assist drug penetration, and emollients in ointments and creams. Such topical formulations may also contain compatible conventional carriers, for example cream or ointment bases, and ethanol or oleyl alcohol for lotions. Such carriers may constitute from about 1% to about 98% by weight of the formulation; more usually they will constitute up to about 80% by weight of the formulation.

[0244] In addition to the therapy described above, the compositions of this invention may be used generally as a wound treatment agent to prevent adhesion of bacteria to matrix proteins exposed in wound tissue and for prophylactic use in dental treatment as an alternative to, or in conjunction with, antibiotic prophylaxis.

[0245] A vaccine composition is conveniently in injectable form. Conventional adjuvants may be employed to enhance the immune response. A suitable unit dose for vaccination is 0.05-5 μg/kg of antigen, and such dose is preferably administered 1-3 times and with an interval of 1-3 weeks.

[0246] With the indicated dose range, no adverse toxicological effects should be observed with the compounds of the invention which would preclude their administration to suitable individuals.

[0247] In a further embodiment the present invention relates to diagnostic and pharmaceutical packs and kits comprising one or more containers filled with one or more of the ingredients of the aforementioned compositions of the invention. The ingredient(s) can be present in a useful amount, dosage, formulation or combination. Associated with such container(s) can be a notice in the form prescribed by a governmental agency regulating the manufacture, use or sale of pharmaceuticals or biological products, reflecting approval by the agency of the manufacture, use or sale of the product for human administration.

[0248] In connection with the present invention any disease related use as disclosed herein such as, e. g. use of the pharmaceutical composition or vaccine, is particularly a disease or diseased condition which is caused by, linked or associated with Streptococci, more preferably, S. pyogenes. In connection therewith it is to be noted that S. pyogenes comprises several strains including those disclosed herein. A disease related, caused or associated with the bacterial infection to be prevented and/or treated according to the present invention includes besides others bacterial pharyngitis, scarlet fever, impetigo, rheumatic fever, necrotizing fasciitis and sepsis in humans.

[0249] In a still further embodiment the present invention is related to a screening method using any of the hyperimmune serum reactive antigens or nucleic acids according to the present invention. Screening methods as such are known to the one skilled in the art and can be designed such that an agonist or an antagonist is screened. Preferably an antagonist is screened which in the present case inhibits or prevents the binding of any hyperimmune serum reactive antigen and fragment thereof according to the present invention to an interaction partner. Such interaction partner can be a naturally occurring interaction partner or a non-naturally occurring interaction partner.

[0250] The invention also provides a method of screening compounds to identify those which enhance (agonist) or block (antagonist) the function of hyperimmune serum reactive antigens and fragments thereof or nucleic acid molecules of the present invention, such as its interaction with a binding molecule. The method of screening may involve high-throughput.

[0251] For example, to screen for agonists or antagonists, the interaction partner of the nucleic acid molecule and nucleic acid, respectively, according to the present invention, maybe a synthetic reaction mix, a cellular compartment, such as a membrane, cell envelope or cell wall, or a preparation of any thereof, may be prepared from a cell that expresses a molecule that binds to the hyperimmune serum reactive antigens and fragments thereof of the present invention. The preparation is incubated with labelled hyperimmune serum reactive antigens and fragments thereof in the absence or the presence of a candidate molecule which may be an agonist or antagonist. The ability of the candidate molecule to bind the binding molecule is reflected in decreased binding of the labelled ligand. Molecules which bind gratuitously, i. e., without inducing the functional effects of the hyperimmune serum reactive antigens and fragments thereof, are most likely to be good antagonists. Molecules that bind well and elicit functional effects that are the same as or closely related to the hyperimmune serum reactive antigens and fragments thereof are good agonists.

[0252] The functional effects of potential agonists and antagonists may be measured, for instance, by determining the activity of a reporter system following interaction of the candidate molecule with a cell or appropriate cell preparation, and comparing the effect with that of the hyperimmune serum reactive antigens and fragments thereof of the present invention or molecules that elicit the same effects as the hyperimmune serum reactive antigens and fragments thereof. Reporter systems that may be useful in the regard include but are not limited to colorimetric labelled substrate converted into product, a reporter gene that is responsive to changes in the functional activity of the hyperimmune serum reactive antigens and fragments thereof, and binding assays known in the art.

[0253] Another example of an assay for antagonists is a competitive assay that combines the hyperimmune serum reactive antigens and fragments thereof of the present invention and a potential antagonist with membrane-bound binding molecules, recombinant binding molecules, natural substrates or ligands, or substrate or ligand mimetics, under appropriate conditions for a competitive inhibition assay. The hyperimmune serum reactive antigens and fragments thereof can be labelled such as by radioactivity or a colorimetric compound, such that the molecule number of hyperimmune serum reactive antigens and fragments thereof bound to a binding molecule or converted to product can be determined accurately to assess the effectiveness of the potential antagonist.

[0254] Potential antagonists include small organic molecules, peptides, polypeptides and antibodies that bind to a hyperimmune serum reactive antigen and fragments thereof of the invention and thereby inhibit or extinguish its acitivity. Potential antagonists also may be small organic molecules, a peptide, a polypeptide such as a closely related protein or antibody that binds to the same sites on a binding molecule without inducing functional activity of the hyperimmune serum reactive antigens and fragments thereof of the invention.

[0255] Potential antagonists include a small molecule which binds to and occupies the binding site of the hyperimmune serum reactive antigens and fragments thereof thereby preventing binding to cellular binding molecules, such that normal biological activity is prevented. Examples of small molecules include but are not limited to small organic molecules, peptides or peptide-like molecules. Other potential antagonists include antisense molecules.

[0256] Other potential antagonists include antisense molecules (see {Okano, H. et al., 1991}; OLIGODEOXYNUCLEOTIDES AS ANTISENSE INHIBITORS OF GENE EXPRESSION; CRC Press, Boca Ration, Fla. (1988), for a description of these molecules).

[0257] Preferred potential antagonists include derivatives of the hyperimmune serum reactive antigens and fragments thereof of the invention.

[0258] As used herein the activity of a hyperimmune serum reactive antigen and fragment thereof according to the present invention is its capability to bind to any of its interaction partner or the extent of such capability to bind to its or any interaction partner.

[0259] In a particular aspect, the invention provides the use of the hyperimmune serum reactive antigens and fragments thereof, nucleic acid molecules or inhibitors of the invention to interfere with the initial physical interaction between a pathogen and mammalian host responsible for sequelae of infection. In particular the molecules of the invention may be used: i) in the prevention of adhesion of S. pyogenes to mammalian extracellular matrix proteins on in-dwelling devices or to extracellular matrix proteins in wounds; ii) to block protein mediated mammalian cell invasion by, for example, initiating phosphorylation of mammalian tyrosine kinases. {Rosenshine, I. et al., 1992} to block bacterial adhesion between mammalian extracellular matrix proteins and bacterial proteins which mediate tissue damage; iv) to block the normal progression of pathogenesis in infections initiated other than by the implantation of in-dwelling devices or by other surgical techniques.

[0260] Each of the DNA coding sequences provided herein may be used in the discovery and development of antibacterial compounds. The encoded protein upon expression can be used as a target for the screening of antibacterial drugs. Additionally, the DNA sequences encoding the amino terminal regions of the encoded protein or Shine-Delgarno or other translation facilitating sequences of the respective mRNA can be used to construct antisense sequences to control the expression of the coding sequence of interest.

[0261] The antagonists and agonists may be employed, for instance, to inhibit diseases arising from infection with Streptococcus, especially S. pyogenes, such as sepsis.

[0262] In a still further aspect the present invention is related to an affinity device such affinity device comprises as least a support material and any of the hyperimmune serum reactive antigens and fragments thereof according to the present invention which is attached to the support material. Because of the specificity of the hyperimmune serum reactive antigens and fragments thereof according to the present invention for their target cells or target molecules or their interaction partners, the hyperimmune serum reactive antigens and fragments thereof allow a selective removal of their interaction partner(s) from any kind of sample applied to the support material provided that the conditions for binding are met. The sample may be a biological or medical sample, including but not limited to, fermentation broth, cell debris, cell preparation, tissue preparation, organ preparation, blood, urine, lymph liquid, liquor and the like.

[0263] The hyperimmune serum reactive antigens and fragments thereof may be attached to the matrix in a covalent or non-covalent manner. Suitable support material is known to the one skilled in the art and can be selected from the group comprising cellulose, silicon, glass, aluminium, paramagnetic beads, starch and dextrane.

[0264] The present invention is further illustrated by the following figures, examples and the sequence listing from which further features, embodiments and advantages may be taken. It is to be understood that the present examples are given by way of illustration only and not by way of limitation of the disclosure.

[0265] In connection with the present invention

[0266] FIG. 1 shows the characterization of S. pyogenes specific human sera.

[0267] FIG. 2 shows the characterization of the small fragment genomic library, LSPy-70, from Streptococcus pyogenes SF370/M1.

[0268] FIG. 3 shows the selection of bacterial cells by MACS using biotinylated human IgGs.

[0269] FIG. 4 shows an example for the gene distribution study with the identified antigens.

[0270] FIG. 5 shows cell surface staining by flow cytometry.

[0271] FIG. 6 shows the protective value of identified recombinant S. pyogenes antigens.

[0272] Table 1 shows the summary of all screens performed with genomic S. pyogenes libraries and human serum.

[0273] Table 2 shows the epitope serology with human sera.

[0274] Table 3 shows the summary of the gene distribution analysis for the identified antigens in fifty S. pyogenes strains.

[0275] Table 4 summarizes the information on the antigenic proteins used for the immunization experiments.

[0276] Table 5 shows the variability of antigenic proteins in six different strains of S. pyogenes.

[0277] The figures to which it might be referred to in the specification are described in the following in more details.

[0278] FIG. 1 shows the characterization of human sera for S. pyogenes as measured by ELISA.

[0279] FIG. 2 shows the fragment size distribution of the Streptococcus pyogenes SF370/Ml small fragment genomic library, LSPy-70. After sequencing 576 randomly selected clones sequences were trimmed to eliminate vector residues and the number of clones with various genomic fragment sizes were plotted. (B) Graphic illustration of the distribution of the same set of randomly sequenced clones of LSPy-70 over the S. pyogenes chromosome. Blue circles indicate matching sequences to annotated ORFs in +/+ orientation. Red rectangles represent fully matched clones to non-coding chromosomal sequences in +/+ orientation. Green diamonds positions all clones with complementary or chimeric sequences. Numeric distances in base pairs are indicated over each circular genome for orientation. Partitioning of various done sets within the library is given in numbers and percentage at the bottom of the figure.

[0280] FIG. 3A shows the MACS selection with biotinylated human IgGs. The LSPy-70 library in pMAL9.1 was screened with 10 μg biotinylated, human serum (P4-IgG) in the first and with 1 μg in the second selection round. As negative control, no serum was added to the library cells for screening. Number of cells selected after the 1^{st} and 2^{nd} elution are shown for each selection round. FIG. 3B shows the reactivity of specific clones (1-52) isolated by bacterial surface display as analysed by Western blot analysis with the human serum (P4-IgG) used for selection by MACS at a dilution of 1:3,000. As a loading control the same blot was also analysed with antibodies directed against the platform protein LamB at a dilution of 1:5,000. LB, Extract from a clone expressing LamB without foreign peptide insert.

[0281] FIG. 4A shows the emm types of S. pyogenes analysed for the gene distribution study. FIG. 4B shows the PCR analysis for the gene distribution of genes Spy0269 with the respective oligonucleotides. The predicted size of the PCR fragments is 1,000 bp. 1-50, S. pyogenes strains as listed under A; N, no genomic DNA added; P, genomic DNA from S. pyogenes SF310, which served as template for library construction.

[0282] FIG. 5 Detection of specific antibody binding on the cell surface of Group A Streptococcus by flow cytometry. In FIG. 5A preimmune mouse sera and polyclonal sera raised against S. pyogenes lysate were incubated with S. pyogenes strain SF370/M1 and analysed by flow cytometry. Control represents the level of non-specific binding of the secondary antibody to the surface of S. pyogenes cells. The histograms in FIG. 5B and 5C indicate the increased fluorescence due to specific binding of anti-Spy0012 (B) or anti-Spy1315 and anti-Spy1798 (C) antibodies in comparison to the control sera against the two platform proteins LamB and FhuA, respectively.

[0283] FIG. 6 NMRI mice were immunized with 3 consecutive doses of recombinant protein (50pg/dose) two weeks apart on days 0, 14 and 28. As negative control, mice were immunized with PBS in the presence of adjuvant. The M1 protein (Spy2018) served as positive control for the challenge experiment. The bacterial challenge was performed with 5×10⁷ S. pyogenes AP1 cells i.v. and survival of mice was observed daily for A) 18 days, B) 21 days and C) 19 days, respectively.

[0284] Table 1: Immunogenic Proteins Identified by Bacterial Surface Display.

[0285] A, LSPy-70 library in lamB with IC3-IgG (1588), B, LSPy-70 library in lamB with IC3-IgA (1539), C, LSPy-70 library in lamB with IC6IgG (1173), D, LSPy-70 library in lamB with P4-IgG (1138), E, LSPy-70 library in lamB with P4IgA (981), F, LSPy-150 library in btuB with IC3-IgG (991), G, LSPy-150 library in btuB with IC6-IgG. (1036), H, LSPy-150 library in btuB with P4IgG (681), I, LSPy400 library in fhuA with IC3-IgG (559), K, LSPy-400 library in fhuA with IC6-IgG (543), L, LSPy-400 library in fhuA with P4-IgG (20), *, prediction of antigenic sequences longer than 5 amino acids was performed with the program ANTIGENIC {Kolaskar, A. et al., 1990}.

[0286] Table 2: Epitope Serology with Human Sera

[0287] Immune reactivity of individual synthetic peptides representing selected epitopes with individual human sera is shown. Extent of reactivity is pattern/grey coded; white: −(<50U), grey: +(50-119U), diagonal: ++(120-199U), diagonally crossed: +++(200-1000U) and vertically crossed: ++++(>1000U). ELISA units (U) are calculated from OD₅₄₅ₙₘ readings and the serum dilution after correction for background. Score, sum of all reactivities (addition of the number of all +); P1 to P10 sera are from patients with acute pharyngitis and N1 to N10 sera are from healthy adults. P and N are used as internal controls.

[0288] Peptide names: SP00012, annotated ORF Spy0012; SPA0450, potential novel ORF in alternative reading-frame of Spy0450; SPC0406, potential novel ORF on complement of Spy0406; SPN0001, potential novel ORF in non-coding region.

[0289] Table 3: Gene Distribution in S. pyogenes Strains.

[0290] Fifty S. pyogenes strains as shown in FIG. 4A were tested by PCR with oligonucleotides specific for the genes encoding relevant antigens. The PCR fragment of one selected PCR fragment was sequenced in order to confirm the amplification of the correct DNA fragment. *, number of amino acid substitutions in strain M89 as compared to S. pyogenes SF370 (M1). #, alternative strain used for sequencing, because gene was not present in M89.

[0291] Table 4: Recombinant Proteins used for Immunisation Experiments in NMRI Mice.

[0292] Immunization with recombinant antigens and challenge with pathogenic S. pyogenes API was performed as described under Experimental procedures. A, The amino acids of the respective antigen contained within the recombinant protein as used for the immunization experiments in animals are given in relation to the full-length protein. B, Percentage of survival is represented as protection and parentheses describes the percentage of protection of the negative control (PBS immunized) followed by the percentage of protection of the positive control (Spy2018). C, Spy0269 was selected due to the fact that the mice showed better survival although at the end of the observation time all mice died. This is reflected by the average survival time as measured in days: 14.6 (Spy0269), 11.6 (PBS) and 19.3 days (Spy2018).

[0293] Table 5: Sequence Variation of Antigenic Proteins from S. pyogenes.

[0294] Antigenic proteins were analysed for amino acid exchanges in six different S. pyogenes strains as listed under experimental procedures. The residue number indicates the position of the amino acid in the full-length protein. In case of Spy1666, changes relative to a homologous gene in Streptococcus pneumoniae TIGR4 (SP0334) are listed, because the gene is highly conserved in S. pyogenes as well as S. pnieumoniae. A, amino acid residue in protein from S. pyogenes SF370. B, amino acid residue(s), which may occur in any one the analysed genes from the other five S. pyogene strains, if different from S. pyogenes SF370. C, residues of Spy0416 involved in catalytic activity. Changes in these residues are anticipated to render the enzyme inactive and are therefore exchanged experimentally with alanine, serine, threonine of glycine to produce an enzymatically inactive recombinant protein.

### EXAMPLES

### Example 1

### Preparation of Antibodies from Human Serum

[0295] The antibodies produced against group A streptococci by the human immune system and present in human sera are indicative of the in vivo expression of the antigenic proteins and their immunogenicity. These molecules are essential for the identification of individual antigens in the approach as described in the present invention, which is based on the interaction of the specific anti-streptococcal antibodies and the corresponding S. pyogenes peptides or proteins. To gain access to relevant antibody repertoires, human sera were collected from

[0296] I. patients with acute S. pyogenes infections, such as pharyngitis, wound infection and bacteraemia. (S. pyogenes was shown to be the causative agent by medical microbiological tests),

[0297] II. uninfected healthy adults, since group A streptococcal infections are common, and antibodies are present as a consequence of natural immunization from previous encounters with streptococci.

[0298] The sera were characterized for anti-S. pyogenes antibodies by a series of ELISA and immunoblotting assays. Several streptococcal antigens have been used to show that the titers measured were not a result of the sum of cross-reactive antibodies. For that purpose two different antigen preparation were used: whole cell extract or culture supernatant proteins prepared from S. pyogenes SF370/M1 cultured overnight (stationary phase) in THB (Todd-Hewitt Broth) growth medium. Both IgG and IgA antibody levels were determined. Sera were selected for further analysis by immunoblotting based on total antibody titers against the two antigen preparations.

[0299] The titers were compared at given dilutions where the response was linear (FIG. 1). Sera were ranked based on the reactivity against multiple streptococcal components, and the highest ones were selected for further analysis by immunoblotting. This extensive antibody characterization approach has led to the unambiguous identification of anti-streptococcal hyperimmune sera.

[0300] Recently it was reported that not only IgG, but also IgA serum antibodies can be recognized by the FcRIII receptors of PMNs and promote opsonization {Phillips-Quagliata, J. et al., 2000; Shibuya, A. et al., 2000}. The primary role of IgA antibodies is neutralization, mainly at the mucosal surface. The level of serum IgA reflects the quality, quantity and specificity of the dimeric secretory IgA. For that reason the serum collection was not only analyzed for anti-streptococcal IgG, but also for IgA levels. In the ELISA assays highly specific secondary reagents were used to detect antibodies from the high affinity types, such as IgG and IgA, but avoided IgM. Production of IgM antibodies occurs during the primary adaptive humoral response, and results in low affinity antibodies, while IgG and IgA antibodies had already undergone affinity maturation, and are more valuable in fighting or preventing disease

[0301] Experimental Procedures

[0302] Peptide Synthesis

[0303] Peptides were synthesized in small scale (4 mg resin; up to 288 in parallel) using standard F-moc chemistry on a Rink amide resin (PepChem, Tuibingen, Germany) using a SyroII synthesizer (Multisyntech, Witten, Germany). After the sequence was assembled, peptides were elongated with Fmoc-epsilon-aminohexanoic acid (as a linker) and biotin (Sigma, St. Louis, Mo.; activated like a normal amino acid). Peptides were cleaved off the resin with 93% TFA, 5% triethylsilane, and 2% water for one hour. Peptides were dried under vacuum and freeze dried three times from acetonitrile/water (1:1). The presence of the correct mass was verified by mass spectrometry on a Reflex m MALDI-TOF (Bruker, Bremen Germany). The peptides were used without further purification.

[0304] Enzyme Linked Immune Assay (ELISA).

[0305] For serum characterization: ELISA plates (Maxisorb, Millipore) were coated with 5-10 μg/ml total protein diluted in coating buffer (0.1M sodium carbonate pH 9.2). Three dilutions of sera (2,000×, 10,000×, 50,000×) were made in PBS-BSA.

[0306] For peptide serology: Biotin-labeled peptides were coating on Streptavidin ELISA plates (EXICON) at 10 μg/ml concentration according to the manufacturer's instructions. Sera were tested at two dilutions, 200× and 1,000×.

[0307] Highly specific Horse Radish Peroxidase (HRP)-conjugated anti-human IgG or anti-human IgA secondary antibodies (Southern Biotech) were used according to the manufacturers' recommendations (dilution: 1,000×). Antigen-antibody complexes were quantified by measuring the conversion of the substrate (ABTS) to colored product based on OD_{405 nm} readings in an automated ELISA reader (TECAN SUNRISE). Following manual coating, peptide plates were processed and analyzed by the Gemini 160 ELISA robot (TECAN) with a built-in reader (GENIOS, TECAN).

[0308] Immunoblotting

[0309] Total bacterial lysate and culture supernatant samples were prepared from in vitro grown S. pyogenes SF370/M1. 10 to 25 μg total protein/lane was separated by SDS-PAGE using the BioRad Mini-Protean 3 Cell electrophoresis system and proteins transferred to nitrocellulose membrane (ECL, Amersham Pharmacia). After overnight blocking in 5% milk, antisera at 2,000× dilution were added, and HRPO labeled anti-mouse IgG was used for detection.

[0310] Preparation: of Bacterial Antigen Extracts

[0311] Total bacterial lysate: Bacteria were lysed by repeated freeze-thaw cycles: incubation on dry ice/ethanol-mixture until frozen (1 min), then thawed at 37° C. (5 min): repeated 3 times. This was followed by sonication and collection of supernatant by centrifugation (3,500 rpm, 15 min, 4° C.). Culture supernatant: After removal of bacteria, the supernatant of overnight grown bacterial cultures was precipitated with ice-cold ethanol (100%): 1 part supernatant/3 parts ethanol incubated o/n at −20° C. Precipitates were collected by centrifugation (2,600 g, for 15 min) and dried. Dry pellets were dissolved either in PBS for ELISA, or in urea and SDS-sample buffer for SDS-PAGE and immunoblotting. The protein concentration of samples was determined by Bradford assay.

[0312] Purfifcation of antibodies for genomic screening. Five sera from both the patient and the non-infected group were selected based on the overall anti-streptococcal titers for a serum pool used in the screening procedure. Antibodies against E. coli proteins were removed by incubating the heat-inactivated sera with whole cell E. coli cells (DH5alpha, transformed with pHIE11, grown under the same condition as used for bacterial surface display). Highly enriched preparations of IgGs from the pooled, depleted sera were generated by protein G affinity chromatography, according to the manufacturer's instructions (UltraLink Immobilized Protein G, Pierce). IgA antibodies were purified also by affinity chromatography using biotin-labeled anti-human IgA (Southern Biotech) immobilized on Streptavidin-agarose (GIBCO BRL). The efficiency of depletion and purification was checked by SDS-PAGE, Western blotting, ELISA and protein concentration measurements.

### Example 2

### Generation of Highly Random, Frame-Selected, Small-Fragment, Genomic DNA Libraries of Streptococcus pyogenes

[0313] Experimental Procedures

[0314] Preparation of streptococcal genomic DNA. 50 ml Todd-Hewitt Broth medium was inoculated with S. pyogenes SF370/M1 bacteria from a frozen stab and grown with aeration and shaking for 18 h at 37° C. The culture was then harvested, centrifuged with 1,600× g for 15 min and the supernatant was removed. Bacterial pellets were washed 3× with PBS and carefully re-suspended in 0.5 ml of Lysozyme solution (100 mg/ml). 0.1 ml of 10 mg/ml heat treated RNase A and 20 U of RNase Ti were added, mixed carefully and the solution was incubated for 1 h at 37° C. Following the addition of 0.2 ml of 20% SDS solution and 0.1 ml of Proteinase K (10 mg/ml) the tube was incubated overnight at 55 ° C. 1/3 volume of saturated NaCl was then added and the solution was incubated for 20 min at 4° C. The extract was pelleted in a microfuge (13,000 rpm) and the supernatant transferred into a new tube. The solution was extracted with PhOH/CHCl₃/IAA (25:24:1) and with CHCl₃/IAA (24:1). DNA was precipitated at room temperature by adding 0.6× volume of Isopropanol, spooled from the solution with a sterile Pasteur pipette and transferred into tubes containing 80% ice-cold ethanol. DNA was recovered by centrifuging the precipitates with 10-12,000× g, then dried on air and dissolved in ddH₂O.

[0315] Preparation of small genomic DNA fragments. Genomic DNA fragments were mechanically sheared into fragments ranging in size between 150 and 300 bp using a cup-horn sonicator. (Bandelin Sonoplus UV. 2200 sonicator equipped with a BB5 cup horn, 10 sec. pulses at 100% power output) or into fragments of size between 50 and 70 bp by mild DNase I treatment (Novagen). It was observed that sonication yielded a much tighter fragment size distribution when breaking the DNA into fragments of the 150-300 bp size range. However, despite extensive exposure of the DNA to ultrasonic wave-induced hydromechanical shearing force, subsequent decrease in fragment size could not be efficiently and reproducibly achieved. Therefore, fragments of 50 to 70 bp in size were obtained by mild DNase I treatment using Novagen's shotgun cleavage kit. A 1:20 dilution of DNase I provided with the kit was prepared and the digestion was performed in the presence of MnCl₂ in a 60 μl volume at 20° C. for 5 min to ensure double-stranded cleavage by the enzyme. Reactions were stopped with 2 μl of 0.5 M EDTA and the fragmentation efficiency was evaluated on a 2% TAE-agarose gel. This treatment resulted in total fragmentation of genomic DNA into near 50-70 bp fragments. Fragments were then blunt-ended twice using T4 DNA Polymerase in the presence of 100 μM each of dNTPs to ensure efficient flushing of the ends. Fragments were used immediately in ligation reactions or frozen at −20° C. for subsequent use.

[0316] Description of the vectors. The vector pMAL4.31 was constructed on a pASK-IBA backbone {Skerra, A., 1994} with the beta-lactamase (bla) gene exchanged with the Kanamycin resistance gene. In addition bla gene was cloned into the multiple cloning site. The sequence encoding mature beta-lactamase is preceded by the leader peptide sequence of ompA to allow efficient secretion across the cytoplasmic membrane. Furthermore a sequence encoding the first 12 amino acids (spacer sequence) of mature beta-lactamase follows the ompA leader peptide sequence to avoid fusion of sequences immediately after the leader peptidase cleavage site, since e.g. clusters of positive charged amino acids in this region would decrease or abolish translocation across the cytoplasmic membrane {Kajava, A. et al., 2000}. A SmaI restriction site serves for library insertion. An upstream FseI site and a downstream NotI site, which were used for recovery of the selected fragment, flank the SmaI site. The three restriction sites are inserted after the sequence encoding the 12 amino acid spacer sequence in such a way that the bla gene is transcribed in the −1 reading frame resulting in a stop codon 15 bp after the NotI site. A +1 bp insertion restores the bla ORF so that beta-lactamase protein is produced with a consequent gain of Ampicillin resistance.

[0317] The vector pMAL9.1 was constructed by cloning the lamB gene into the multiple cloning site of pEH1 {Hashemzadeh-Bonehi, L. et al., 1998}. Subsequently, a sequence was inserted in lamB after amino acid 154, containing the restriction sites FseI, SmaI and NotI. The reading frame for this insertion was constructed in such a way that transfer of frame-selected DNA fragments excised by digestion with FseI and NotI from plasmid pMAL4.31 yields a continuous reading frame of lamB and the respective insert. The vector pMAL10.1 was constructed by cloning the btuB gene into the multiple cloning site of pEH1. Subsequently, a sequence was inserted in btuB after amino acid 236, containing the restriction sites FseI, XbaI and NotI. The reading frame for this insertion was chosen in a way that transfer of frame-selected DNA fragments excised by digestion with FseI and NotI from plasmid pMAL4.31 yields a continuous reading frame of btuB and the respective insert.

[0318] The vector pHIE11 was constructed by cloning the fhuA gene into the multiple cloning site of pEH1. Thereafter, a sequence was inserted fhuA after amino acid 405, containing the restriction site FseI, XbaI and NotI. The reading frame for this insertion was chosen in a way that transfer of frame-selected DNA fragments excised by digestion with FseI and NotI from plasmid pMAL4.31 yields a continuous reading frame of fhuA and the respective insert.

[0319] Cloning and evaluation of the library for frame selection. Genomic S. pyogenes DNA fragments were ligated into the SmaI site of the vector pMAL4.31. Recombinant DNA was electroporated into DH10B electrocompetent E. coli cells (GIBCO BRL) and transformants plated on LB-agar supplemented with Kanamycin (50 μg/ml) and Ampicillin (50 μg/ml). Plates were incubated over night at 37° C. and colonies collected for large scale DNA extraction. A representative plate was stored and saved for collecting colonies for colony PCR analysis and large-scale sequencing. A simple colony PCR assay was used to initially determine the rough fragment size distribution as well as insertion efficiency. From sequencing data the precise fragment size was evaluated, junction intactness at the insertion site as well as the frame selection accuracy (3n+1 rule).

[0320] Cloning and evaluation of the library for bacterial surface display. Genomic DNA fragments were excised from the pMAL4.31 vector, containing the S. pyogenes library with the restriction enzymes FseI and NotI. The entire population of fragments was then transferred into plasmids pMAL9.1 (LamB), p14AL10.1 (BtuB) or pHIE11 (FhuA), which have been digested with FseI and NotI. Using these two restriction enzymes, which recognise an 8 bp GC rich sequence, the reading frame that was selected in the pMAL4.31 vector is maintained in each of the platform vectors. The plasmid library was then transformed into E. coli DH5alpha cells by electroporation. Cells were plated onto large LB-agar plates supplemented with 50 μg/ml Kanamycin and grown over night at 37° C. at a density yielding clearly visible single colonies. Cells were then scraped off the surface of these plates, washed with fresh LB medium and stored in aliquots for library screening at −80° C.

[0321] Results

[0322] Libraries for frame selection. Three libraries (LSPy70, LSPy150 and LSPy300) were generated in the pMAL4.31 vector with sizes of approximately 70, 150 and 300 bp, respectively. For each library, ligation and subsequent transformation of approximately 1 μg of pMAL4.31 plasmid DNA and 50 μg of fragmented genomic S. pyogenes DNA yielded 4×10⁵ to 2×10⁶ clones after frame selection. To assess the randomness of the libraries, approximately 600 randomly chosen clones of LSPy70 were sequenced. The bioinformatic analysis showed that of these clones only very few were present more than once. Furthermore, it was shown that 90% of the clones fell in the size range between 16 and 61 bp with an average size of 34 bp (FIG. 2). All sequences followed the 3n+1 rule, showing that all clones were properly frame selected.

[0323] Bacterial surface display libraries. The display of peptides on the surface of E. coli required the transfer of the inserts from the LSPy libraries from the frame selection vector pMAL4.31 to the display plasmids pMAL9.1 (LamB), pMAL10.1 (BtuB) or pHIE11 (FhuA). Genomic DNA fragments were excised by FseI and NotI restriction and ligation of 5 ng inserts with 0.1 μg plasmid DNA and subsequent transformation into DH5alpha cells resulted in 2-5×10⁶ clones. The clones were scraped off the LB plates and frozen without further amplification.

### Example 3

### Identification of Highly Immunogenic Peptide Sequences from S. pyogenes using Bacterial Surface Displayed Genomic Libraries and Human Serum

[0324] Experimental Procedures

[0325] MACS screening. Approximately 2.5×10⁸ cells from a given library were grown in 5 ml LB-medium supplemented with 50 μg/ml Kanamycin for 2 h at 37° C. Expression was induced by the addition of 1 mM IPTG for 30 min. Cells were washed twice with fresh LB medium and approximately 2×10⁷ cells re-suspended in 100 μl LB medium and transferred to an Eppendorf tube.

[0326] 10 μg of biotinylated, human IgGs from purified from serum was added to the cells and the suspension incubated over night at 4° C. with gentle shaking. 900 μl of LB medium was added, the suspension mixed and subsequently centrifuged for 10 min at 6,000 rpm at 4° C. (For IgA screens, 10 μg of purified IgAs were used and these captured with biotinylated anti-human-IgG secondary antibodies). Cells were washed once with 1 ml LB and then re-suspended in 100 μl LB medium. 10 μl of MACS microbeads coupled to streptavidin (Miltenyi Biotech, Germany) were added and the incubation continued for 20 min at 4° C. Thereafter 900 μl of LB medium was added and the MACS microbead cell suspension was loaded onto the equilibrated MS column (Miltenyi Biotech, Germany) which was fixed to the magnet. (The MS columns were equilibrated by washing once with 1 ml 70% EtOH and twice with 2 ml LB medium.)

[0327] The column was then washed three times with 3 ml LB medium. After removal of the magnet, cells were eluted by washing with 2 ml LB medium. After washing the column with 3 ml LB medium, the 2 ml eluate was loaded a second time on the same column and the washing and elution process repeated. The loading, washing and elution process was performed a third time, resulting in a final eluate of 2 ml.

[0328] A second round of screening was performed as follows. The cells from the final eluate were collected by centrifugation and re-suspended in 1 ml LB medium supplemented with 50 μg/ml Kanamycin. The culture was incubated at 37° C. for 90 min and then induced with 1 mM IPTG for 30 min. Cells were subsequently collected, washed once with 1 ml LB medium and suspended in 10 μl LB medium. Since the volume was reduced, 1 μg of human, biotinylated IgGs was added and the suspension incubated over night at 4° C. with gentle shaking. All further steps were exactly the same as in the first selection round. Cells selected after two rounds of selection were plated onto LB-agar plates supplemented with 50 μg/ml Kanamycin and grown over night at 37° C.

[0329] Evaluation of selected clones by sequencing and Western blot analysis. Selected clones were grown over night at 37° C. in 3 ml LB medium supplemented with 50 μg/ml Kanamycin to prepare plasmid DNA using standard procedures. Sequencing was performed at MWG (Germany) or in collaboration with TIGR (U.S.A.).

[0330] For Western blot analysis approximately 10 to 20 μg of total cellular protein was separated by 10% SDS-PAGE and blotted onto HybondC membrane (Amersham Pharmacia Biotech, England). The LamB, BtuB or FhuA fusion proteins were detected using human serum as the primary antibody at a dilution of approximately 1:5,000 and anti-human IgG or IgA antibodies coupled to HRP at a dilution of 1:5,000 as secondary antibodies. Detection was performed using the ECL detection kit (Amersham Pharmacia Biotech, England). Alternatively, rabbit anti FhuA or mouse anti LamB antibodies were used as primary antibodies in combination with the respective secondary antibodies coupled to HRP for the detection of the fusion proteins.

[0331] Results

[0332] Screening of bacterial surface display libraries by magnetic activated cell sorting (MACS) using biotinylated Igs. The libraries LSPy70 in pMAL9.1, LSPy150 in pMAL10.1 and LSPy300 in pHIE11 were screened with pools of biotinylated, human IgGs and IgAs from patient sera or sera from healthy individuals (see Example 1: Preparation: of antibodies front human serum). The selection procedure was performed as described under Experimental procedures. FIG. 3A shows a representative example of a screen with the LSPy-70 library and P4IgGs. As can be seen from the colony count after the first selection cycle from MACS screening, the total number of cells recovered at the end is drastically reduced from 3×10⁷ cells to approximately 5×10⁴ cells, whereas the selection without antibodies added showed a reduction to about 2×10³ cells (FIG. 3A). After the second round, a similar number of cells was recovered with P4-IgG, while fewer than 10 cells were recovered when no IgGs from human serum were added, clearly showing that selection was dependent on S. pyogenes specific antibodies. To evaluate the performance of the screen, approximately 50 selected clones were picked randomly and subjected to Western blot analysis with the same, pooled serum (FIG. 3B). This analysis revealed that 70% of the selected clones showed reactivity with antibodies present in the relevant serum whereas the control strain expressing LamB without a S. pyogenes specific insert did not react with the same serum. In general, the rate of reactivity was observed to lie within the range of 35 to 75%. Colony PCR analysis showed that all selected clones contained an insert in the expected size range.

[0333] Subsequent sequencing of a larger number of randomly picked clones (600 to 1200 per screen) led to the identification of the gene and the corresponding peptide or protein sequence that was specifically recognized by the human serum used for screening. The frequency with which a specific done is selected reflects at least in part the abundance and/or affinity of the specific antibodies in the serum used for selection and recognizing the epitope presented by this done. In that regard it is striking that clones derived from some ORFs (e.g. Spy0433, Spy2025) were picked more than 80 times, indicating their highly immunogenic property. Table 1 summarizes the data obtained for all 15 performed screens. All clones that are presented in Table 1 have been verified by Western blot analysis using whole cellular extracts from single clones to show the indicated reactivity with the pool of human serum used in the respective screen. As can be seen from Table 1, distinct regions of the identified ORF are identified as immunogenic, since variably sized fragments of the proteins are displayed on the surface by the platform proteins.

[0334] It is further worth noticing that most of the genes identified by the bacterial surface display screen encode proteins that are either attached to the surface of S. pyogenes and/or are secreted. This is in accordance with the expected role of surface attached or secreted proteins in virulence of S. pyogenes.

### Example 4

### Assessment of the Reactivity of Highly Immunogenic Peptide Sequences with Individual Human Sera

[0335] Approximately 100 patients and 60 healthy adult sera were included in the analysis. Following the bioinformatic analysis of selected clones, corresponding peptides were designed and synthesized. In case of epitopes with more than 28 amino acid residues, overlapping peptides were made. All peptides were synthesized with a N-terminal biotin-tag and used as coating reagents on Streptavidin-coated ELISA plates.

[0336] The analysis was performed in two steps. First, peptides were selected based on their reactivity with the individual sera, which were included in the serum pools (five individual sera) used for preparations of IgG and IgA screening reagents for bacterial surface display. Peptides not displaying a positive reaction were not included in further, more detailed studies. Second, a large number of not pre-selected individual sera from patients with acute pharyngitis or with post-streptococcal diseases or from healthy adults and children were tested against the peptides showing specific and high reactivity with the screening sera. Antibody levels were measured by ELISA and compared by the score calculated for each peptide based on the number of positive sera and the extent of reactivity. An example for serum reactivity of 174 peptides representing S. pyogenes epitopes from the genomic screen with 20 human sera (representing 4 different pools of five sera) used for the antigen identification is shown in table 2. The peptides range from highly and widely reactive to weakly positive ones. Among the most reactive ones there are known antigens, some of them are also protective in animal challenge models for nasopharyngeal carriage (eg. C5a peptidase and M protein).

### Example 5

### Gene Distribution Studies with Highly Immunogenic Proteins Identified from S. pyogenes

[0337] Gene distribution of group A streptococcal antigens by PCR. An ideal vaccine antigen would be an antigen that is present in all, or the vast majority of strains of the target organism to which the vaccine is directed. In order to establish whether the genes encoding the identified Streptococcus pyogenes antigens occur ubiquitously in S. pyogenes strains, PCR was performed on a series of independent S. pyogenes isolates with primers specific for the gene of interest. S. pyogenes isolates were obtained covering emm types most frequently present in patients as shown in FIG. 4A. Oligonucleotide sequences as primers were designed for all identified ORFs yielding products of approximately 1,000 bp, if possible covering all identified immunogenic epitopes. Genomic DNA of all S. pyogenes strains was prepared as described under Example 2. PCR was performed in a reaction volume of 25 μl using Taq polymerase (1U), 200 nM dNTPs, 10 pMol of each oligonucleotide and the kit according to the manufacturers instructions (Invitrogen, The Netherlands). As standard, 30 cycles (1×: 5 min. 95° C., 30×: 30 sec. 95° C., 30 sec. 56° C., 30 sec. 72° C., 1×4 min. 72° C.) were performed, unless conditions had to be adapted for individual primer pairs.

[0338] Results

[0339] All identified genes encoding immunogenic proteins were tested by PCR for their presence in 50 different strains of S. pyogenes (FIG. 4A). As an example, FIG. 4B shows the PCR reaction for Spy0269 with all indicated 50 strains. As clearly visible, the gene is present in all strains analysed. The PCR fragment from strain no 8 (M89) was sequenced and showed that of 917 bp only 2 bp are different as compared to the S. pyogenes M1 strain SF310, resulting in only one amino acid difference between the two isolates. From a total of 96 genes analysed, 70 were present in all strains tested, while 22 genes were absent in more than 10 of the tested 50 strains (Table 3). Several genes (Spy0433, Spy0681) showed variation in size and were not present in all strain isolates. Some genes showed variation in size, but were otherwise conserved in all tested strains (e.g. Spy1371). Sequencing of the generated PCR fragment from one strain and subsequent comparison to the M1 strain confirmed the amplification of the correct DNA fragment and revealed a degree of sequence divergence as indicated in Table 3. Importantly, many of the identified antigens are well conserved in all strains in sequence and size and are therefore novel vaccine candidates to prevent infections by group A streptococci.

### Example 6

### Characterization of Immune Sera Obtained from Mice Immunized with Highly Immunogenic Proteins/Peptides from S. pyogenes Displayed on the Surface of E. coli

[0340] Generation of Immune Sera from Mice

[0341] E. coli clones harboring plasmids encoding the platform protein fused to a S. pyogenes peptide, were grown in LB medium supplemented with 50 μg/ml Kanamycin at 37° C. Overnight cultures were diluted 1:10, grown until an OD₆₀₀ of 0.5 and induced with 0.2 mM IPTG for 2 hours. Pelleted bacterial cells were suspended in PBS buffer and disrupted by sonication on ice, generating a crude cell extract. According to the OD₆₀₀ measurement, an aliquot corresponding to 5×10⁷ cells was injected into NMRI mice i.v., followed by a boost after 2 weeks. Serum was taken 1 week after the second injection. Epitope specific antibody levels were measured by peptide ELISA.

[0342] In vitro Expression of Antigens

[0343] Expression of antigens by in vitro grown S. pyogenes SF370/M1 was tested by immunoblotting. Different growth media and culture conditions were tested to detect the presence of antigens in total lysates and bacterial culture supernatants. Expression was considered confirmed when a specific band corresponding to the predicted molecular weight and electrophoretic mobility was detected.

[0344] Cell Surface Staining

[0345] Flow cytometric analysis was carried out as follows. Bacteria were grown under culture conditions, which resulted in expression of the antigen as shown by the immunoblot analysis. Cells were washed twice in Hanks Balanced Salt Solution (H3SS) and the cell density was adjusted to approximately 1×10⁶ CFU in 100 μa HBSS, 0.5% BSA. After incubation for 30 to 60 min at 4° C. with antisera diluted 50 to 100-fold, unbound antibodies were washed away by centrifugation in excess HBSS, 0.5% BSA. Secondary goat anti-mouse antibody (F(ab′)₂ fragment specific) labeled with fluorescein (FITC) was incubated with the cells at 4° C. for 30 to 60 min. After washing the cells, antibodies were fixed with 2% paraformaldehyde. Bound antibodies were detected using a Becton Dickinson FACScan flow cytometer and data further analyzed with the computer program CELLQuest. Control sera included mouse pre-immune serum and mouse polyclonal serum generated with lysates prepared from IPTG induced E. coli cells transformed with plasmids encoding the genes lamB or fhuA without S. pyogenes genomic insert.

[0346] Opsonophagocytosis Assay

[0347] Epitope specific immune sera were tested for their activity to induce opsonophagocytosis in a FACS based assay. Sera were heat inactivated and anti-E. coli antibodies then removed by incubation with whole cell E. coli (3×). 10⁷ Alexa 488 labeled S. pyogenes cells were pre-opsonized in the presence of 2-10% immune serum and 2% hamster serum as complement source and then added to 10⁶ phagocytic cells (RAW246.7 or P388.D1 murine monocytic cell lines). The cell mixture was incubated for 30 min at 37° C. Time, IgG concentration and complement dependent uptake of bacteria was registered as an increase in mean fluorescence intensity of the phagocytic cells measured with a fluorescence activated cell sorter.

[0348] Bactericidal (Killing) Assay

[0349] Murine macrophage cells (RAW246.7 or P388.D1) and bacteria were incubated and the loss of viable bacteria after 60 min was determined by colony counting. In brief, bacteria were washed twice in Hanks Balanced Salt Solution (HBSS) and the cell density was adjusted to approximately 1×10⁵ CFU in 50 μl HBSS. Bacteria were incubated with mouse sera (up to 25%) and guinea pig complement (up to 5%) in a total volume of 100 μl for 60 min at 4° C. Pre-opsonized bacteria were mixed with macrophages (murine cell line RAW264.7 or P388.D1; 2×10⁶ cells per 100 μl) at a 1:20 ratio and were incubated at 37° C. on a rotating shaker at 500 rpm. An aliquot of each sample was diluted in sterile water and incubated for 5 min at room temperature to lyse macrophages. Serial dilutions were then plated onto Todd-Hewitt Broth agar plates. The plates were incubated overnight at 37° C., and the colonies were counted with the Countermat flash colony counter (IUL Instruments). Control sera included mouse pre-immune serum and mouse polyclonal serum generated with lysates prepared from IPTG induced E. coli transformed with plasmids harboring the genes lamB or fhuA without S. pyogenes genomic insert.

[0350] Results

[0351] In vitro expression and cell surface staining. The expression of the antigenic proteins was analyzed in vitro in S. pyogenes SF370/M1 by using sera raised against E. coli clones harboring plasmids encoding the platform protein fused to a S. pyogenes peptide. This analysis served as a first step to determine whether a protein is expressed at all in order to evaluate surface expression of the polypeptide by FACS analysis. It was anticipated that not all protein would be expressed under in vitro conditions, but several proteins were detected by Western blot analysis in total cell lysates (e.g. Spy0012, Spy0112, Spy0416, Spy0437, Spy0872, Spy1032, Spy1315, Spy1798; data not shown). Cell surface accessibility for several antigenic proteins was subsequently demonstrated by an assay based on flow cytometry. Streptococci were incubated with preimmune and polyclonal mouse sera raised against S. pyogenes lysate or E. coli clones harboring plasmids encoding the platform protein fused to a S. pyogenes peptide, follow by detection with fluorescently tagged secondary antibody. As shown in FIG. 5A, antisera raised against S. pyogenes lysate cause a shift in fluorescence of the S. pyogenes SF370/M1 cell population. Similar cell surface staining of S. pyogenes SF370/M1 cells was observed with polyclonal sera raised against peptides of antigen Spy0012 (FIG. 5B), Spy1315 and Spy1798 (FIG. 5C), although only a subpopulation of the bacteria was stained, as indicated by the detection of two peaks. This phenomenon may be a result of differential expression of the gene products during the growth of the bacterium or partial inhibition of antibody binding caused by other surface molecules.

[0352] These experiments confirmed the bioinformatic prediction that these proteins are exported due to their signal peptide sequence and in addition showed that they are anchored on the cell surface of S. pyogenes SF370/M1. They also confirm that these proteins are available for recognition by human antibodies and make them valuable candidates for the development of a vaccine against Group A Streptococcal disease.

### Example 7

### Protective Immune Responses Against Infection with Group A streptococci upon Immunization with Recombinant Antigens

[0353] Experimental Procedures

[0354] Cloning of Genes Encoding Antigenic Proteins

[0355] The gene or DNA fragment of interest was amplified from genomic DNA of S. pyogenes SF370 by PCR amplification using gene specific primers. Apart from the gene specific sequence, the primers contained additional bases at the respective 5′ end consisting of restriction sites that aided in the directional cloning of the amplified PCR product. The gene specific sequence of the primer ranged between 15-24 bases in length. The PCR products obtained were digested with the appropriate restriction enzymes and cloned into the appropriately digested pET28b(+) vector (NOVAGEN). After confirmation of the construction of the recombinant plasmid, E. coli BL21 STAR® cells (INVITROGEN) that served as expression hosts were transformed. These cells are optimized to efficiently express the gene of interest as encoded by the pET28b plasmid.

[0356] Expression of Antigens in Escherichia coli

[0357] E. coli BL21 STAR® cells harboring the recombinant plasmid were grown into log phase in LB medium supplemented with 50 kg/ml Kanamycin at 37° C. Once an OD_{600 nm} of 0.8 was reached, the culture was induced with 1 mM IPTG for 3 hours at 37° C. The cells were harvested by centrifugation, lysed by a combination of the freeze-thaw method followed by disruption of cells with the Bug-buster® reagent from NOVAGEN. The lysate was separated by centrifugation into soluble (supernatant) and insoluble (pellet) fractions.

[0358] Purification of Recombinant Proteins from E. coli

[0359] Depending on the localization of the protein, different purification strategies were followed. Proteins in the soluble fraction were purified by binding the supernatant of the cell lysates after cell disruption to Ni-Agarose beads (Ni—NTA-Agarosee, QIAGEN). Due to the presence of the penta-Histidine (HIS) at the C, N or both termini of the expressed protein, the protein binds to Ni-agarose while other contaminating proteins are washed and removed from the column by washing buffer. The proteins were eluted by a solution containing 100 mM imidazole in the appropiate buffer. The eluate was concentrated, assayed by Bradford for protein concentration and analysed by SDS-PAGE and Western blot. Proteins in the insoluble fraction were purified by solubilization of the pellet in an appropriate buffer containing 8 M Urea. The purification was performed under denaturing conditions (in buffer containing 8M Urea) using the same materials and procedure as mentioned above for soluble proteins. The eluate was concentrated and dialyzed to remove all urea in a gradual or stepwise manner. The final protein solution was concentrated, analysed by SDS-PAGE and measured by Bradford method. Expression was considered confirmed when a specific band corresponding to the predicted molecular weight and electrophoretic mobility was detected. For proteins, which precipitated during dialysis due to the removal of the denaturing reagent urea, the insoluble inclusion bodies were washed several times and directly used for immunization of mice.

[0360] Immunisation of NMRI Mice with Recombinant Proteins and Challenge with S. pyogenes AP1

[0361] The immunogenicity of the proteins was assayed in an experimental animal model using NMRI mice and the S. pyogenes strain AP1 as infectious agent. Ten female NMRI mice at 7-8 weeks of age were immunized with 50 μg/dose of recombinant protein every 2 weeks for a total of 3 doses. The initial dose was adjuvanted with Complete Freund's adjuvant while the remaining two doses were adjuvanted with Incomplete Freund's adjuvant. At the end of the immunization the mice were bled to check the antibody titer and subsequentely intravenously (i.v.) challenged with a lethal dose of S. pyogenes AP1 (5×10⁷ pathogenic bacteria). The mice were scored for 18 to 21 days post challenge for survival.

[0362] Results

[0363] Expression and Purification of Recombinant Proteins.

[0364] Of the 31 proteins selected for recombinant protein expression, 29 proteins could be produced in E. coli to a level sufficient for purification. While some of the proteins could be produced as soluble protein (see Table 4), some proteins turned out to be insoluble (e.g. Spy416B, Spy0872) or precipitated upon dialysis, which was intended to remove the denaturing reagent urea after solubilization of insoluble proteins such as Spy0031, Spy0292, Spy720. In these cases the washed inclusion bodies were directly injected into mice for immunization. In generell, the affinity purification yielded a recombinant protein preparation of at least 85% purity.

[0365] Immune Responses after Immunization with Recombinant Proteins in NMRI Mice.

[0366] Table 4 lists those antigens, which were tested in mice and showed some degree of protection in experimental animals. Recombinant proteins, which were also tested in the bacteremia model in animals, but did show not any level of protection in the described experiments are not listed here; but include proteins such as Spy0012, Spy1063 and Spy1494. The described bacteremia model evaluates the protective value of vaccine candidates against invasive disease as pathogenic bacteria are directly injected into the blood. Recombinant proteins, which induce antibodies capable of protection against such group A streptococcal infection, are considered as valuable candidates for the development of a vaccine against Group A Streptococcal disease. In comparison to the positive control Spy2018 (M1 protein), which was previously shown to provide protection against S. pyogenes challenge, a number of antigens performed to a similar degree when the endpoint of the challenge experiment after 18 or 21 days (Table 4) was assessed (Spy0416, Spy1607 or Spy0292). Other proteins showed only a partial protective effect (Spy0720, Spy0872), but may prove very effective when combined with other antigens (FIG. 6). Surprisingly, the antigen screen had identified immunogenic epitopes predominantly in the first half of the two larger proteins, Spy0416 and Spy1972. Therefore it was reasoned that the protective region may also be contained in the N terminal part of the protein. In case of Spy0416, both parts of the antigen were produced as recombinant protein (Spy0416A and Spy0416B; see Table4) and tested in animal experiments. The experiments showed that only the first half of the protein Spy0416 (Table 4; Spy0416A) provided protection in the animal model, while the second half of the protein (Spy0416B) had no protective effect at all, clearly delineating a smaller region within the protein as the vaccine candidate. For antigen Spy¹⁹⁷² only the first half of the full-length protein was produced as recombinant protein and tested in the animal model.

### Example 8

### Variability of Genes Encoding Antigenic Proteins in S. pyogenes Strains of Various Serotypes

[0367] Experimental Procedures

[0368] Sequencing of PCR fragments and Bioinformatic Analysis.

[0369] The PCR analysis of S. pyogenes strains is described in Example 5. The sequencing of the PCR fragments provided an estimate of the variability of the gene and the summary of the results are listed in Table 3. The availability of genomic sequences from five Streptococcus pyogenes strains (SF370: M1; MGAS8232: M18; SSI-1: M3; MGAS315: M3; Manfredo: M5) allowed a further assessment of the variability of the antigens. All sequences were aligned with the respective antigen sequence from S. pyogenes SF370 and those amino acid residues identified which differed from the ones in the antigenic protein from S. pyogenes SF370. Inserted or deleted sequences were detected in some of the antigenic proteins, but are not contained in this analysis.

[0370] Results

[0371] Table 5 shows all positions that were identified to be variable in the indicated antigens in one of the four S. pyogenes strains (MGAS8232: M18; SSI-1: M3; MGAS315: M3; Manfredo: M5) or the strain used for sequencing of the amplified PCR fragment (see Table 3). The bioinformatic analysis shows that some of the antigenic proteins are very well conserved without a single amino exchange in any of the six strains of serotypes M1, M3, M5, M18 and M89. Proteins belonging to this group include Spy0103 and Spy1536, while the exchanges in the other antigenic proteins are more numerous in larger proteins than in smaller ones, as expected from the difference in size by itself. Although a variety of strains was analysed, it was almost never observed that a single residue was changed to more than one other amino acid in the other strains. A further analysis of sequences of the respective genes in a larger number of strains of varying serotypes, clinical indication or geographic location would certainly identify possible changes in those amino acid residues listed or in additional residues.

[0372] Only one of the antigenic proteins analysed by the alignment of six gene sequences showed a considerable degree of variation in size (Spy1357: SF370-217 amino acids; MGAS8232-245 aa; SSI-1-329 aa; MGAS315-329 aa; Manfredo -279 aa). Thus it is evident, that most of the evaluated antigens are very well conserved in sequence as well as in size and provide promising candidates for vaccine development. REFERENCES
[0373] Altschul, S., et al. (1990). Journal of Molecular Biology 215: 403-10.
[0374] Bennett, D., et al. (1995). J. Mol Recognit 8: 52-8.
[0375] Bessen, D., et al. (1988). Infect Immun 56: 2666-2672.
[0376] Bisno, A., et al. (1987). Infect Immun 55: 753-7.
[0377] Bronze, M., et al. (1988). J. Immunol 141:2767-2770.
[0378] Clackson, T., et al. (1991). Nature 352: 624-8.
[0379] Cone, L., et al. (1987). New Engl J. Med 317: 146-9.
[0380] Cunningham, M. (2000). Clin Microbiol Rev 13:470-511.
[0381] Devereux, J., et al. (1984). Nucleic acids research 12: 387-95.
[0382] Doherty, E., et al. (2001). Annu Rev Biophys Biomol Struct 30:457-475.
[0383] Eisenbraun, M., et al. (1993). DNA Cell Biol 12: 791-7.
[0384] Enright M., et al. (2001) Inf. Immun. 69: 2416-27
[0385] Etz, H., et al. (2001). J. Bacteriol 183: 6924-35.
[0386] Fenderson, P., et al. (1989). J. Immunol 142: 2475-2481.
[0387] Fischetti, V. (1989). Clin Microbiol Rev 2: 285-314.
[0388] Ganz, T. (1999). Science 286:420-421.
[0389] Georgiou, G. (1997). Nature Biotechnology 15: 29-34.
[0390] Guzman, C., et al. (1999). J. Infect Dis 179: 901-6.
[0391] Hashemzadeh-Bonehi, L., et al. (1998). Mol Microbiol 30: 676-678.
[0392] Heinje, von G, (1987) e.g. Sequence Analysis in Molecular Biology, Acedimic Press
[0393] Hemmer, B., et al. (1999). Nat Med 5: 1375-82.
[0394] Hoe N., et al. (2001) J. Inf. Dis. 183: 633-9
[0395] Hope-Simpson, R. (1981). J. Hyg (Lond) 87:109-29.
[0396] Ji, Y., et al. (1997). Infect Immun 65: 2080-2087.
[0397] Johanson, K., et al. (1995). J. Biol Chem 270:9459-71.
[0398] Jones, P., et al. (1986). Nature 321:522-5.
[0399] Kajava, A., et al. (2000). J. Bacteriol 182: 2163-9.
[0400] Kohler, G., et al. (1975). Nature 256: 495-7.
[0401] Kolaskar, A., et al. (1990). FEBS Lett 276: 172-4.
[0402] Lee, P. K (1989). J. Clin Microbiol 27: 1890-2.
[0403] Lewin, A., et al. (2001). Trends Mol Med 7:221-8.
[0404] Marks, J., et al. (1992). Biotechnology (N Y) 10: 779-83.
[0405] McCafferty, J., et al. (1990). Nature 348: 552-4.
[0406] Okano, H., et al. (1991). J. Neurochem 56:560-7.
[0407] Oligodeoxynucleotides as Antisense Inhibitors of Gene Expression; CRC Press, Boca Ration, Fla. (1988) for a description of these molecules
[0408] Phillips-Quagliata, J., et al. (2000). J. Immunol 165: 2544-55.
[0409] Rammensee, H., et al. (1999). Immunogenetics 50: 213-9.
[0410] Rosenshine, I., et al. (1992). Infect Immun 60: 2211-7.
[0411] Seeger, C., et al. (1984). Proc Natl Acad Sci U S A 81: 5849-52.
[0412] Shibuya, A., et al. (2000). Nature Immunology 1: 441-6.
[0413] Skerra, A. (1994). Gene 151: 131-5.
[0414] Stevens, D. (1992). Clin Infect Dis 14: 2-11.
[0415] Tang, D., et al. (1992). Nature 356: 152-4.
[0416] Tempest, P., et al. (1991). Biotechnology (N Y) 9: 266-71.
[0417] Tourdot, S., et al. (2000). Eur I Immunol 30: 3411-21.
[0418] Whitnack, E., et al. (1985). J. Exp Med 162: 1983-97.
[0419] Wiley, J., et al. (1987) Current Protocols in Molecular Biology

[0420] Vitali, L., et al. (2002) J. Clin. Microbiol 40:679-681

TABLE 1
Immunogenic proteins identified by bacterial surface display.

| | | | | Location of | |
|---|---|---|---|---|---|
| | | | | identified | |
| S. pyogenes | | | No. of selected | immuno- | Seq. |
| antigenic | Putative function | | clones per ORF | genic | ID (DNA, |
| protein | (by homology) | predicted immunogenic aa** | and screen | region (aa) | Prot.) |
| Spy0012 | Hypothetical protein | 4-44, 57-65, 67-98, 101-107, 109-125, 131-144, 146-159, | A: 12, I: 5, N: 2 | 1-114 | 1, 151 |
| | | 168-173, 181-186, 191-200, 206-213, 229-245, | | | |
| | | 261-269, 288-301, 304-317, 323-328, 350-361, 374-384, | | | |
| | | 388-407, 416-425 | | | |
| Spy0019 | putative secreted | 5-17, 49-64, 77-82, 87-98, 118-125, 127-140, 142-150, | F: 2, I: 16, K: 24, | 29-226 | 2, 152 |
| | protein (cell division | 153-159, 191-207, 212-218, 226-270, 274-287, 297-306, | N: 29, P: 12 | | |
| | and antibiotic | 325-331, 340-347, 352-369, 377-382, 390-395 | | | |
| | tolerance) | | | | |
| Spy0025 | putative | 4-16, 20-26, 32-74, 76-87, 93-108, 116-141, 148-162, | D: 3 | 919-929 | 3, 153 |
| | phosphoribosylformyl | 165-180, 206-219, 221-228, 230-236, 239-245, 257-268, | | | |
| | glycinamidine | 313-328, 330-335, 353-359, 367-375, 394-403, | | | |
| | synthase II | 414-434, 437-444, 446-453, 456-464, 478-487, 526-535, | | | |
| | | 541-552, 568-575, 577-584, 589-598, 610-618, | | | |
| | | 624-643, 653-665, 667-681, 697-718, 730-748, 755-761, | | | |
| | | 773-794, 806-821, 823-831, 837-845, 862-877, | | | |
| | | 879-889, 896-919, 924-930, 935-940, 947-955, 959-964, | | | |
| | | 969-986, 991-1002, 1012-1036, 1047-1056, 1067-1073, | | | |
| | | 1079-1085, 1088-1111, 1130-1135, 1148-1164, | | | |
| | | 1166-1173, 1185-1192, 1244-1254 | | | |
| Spy0031 | putative choline | 5-44, 62-74, 78-83, 99-105, 107-113, 124-134, 161-174, | I: 3, K: 3, N: 3 | 145-305 | 4, 154 |
| | binding protein | 176-194, 203-211, 216-237, 241-247, 253-266, | | | |
| | | 272-299, 323-349, 353-360 | | | |
| Spy0103 | putative competence | 15-39, 52-61, 72-81, 92-97 | A: 8 | 71-81 | 5, 155 |
| | protein | | | | |
| Spy0112 | putative pyrroline | 13-19, 21-31, 40-108, 115-122, 125-140, 158-180, | B: 4 | 173-186 | 6, 156 |
| | carboxylate reductase | 187-203, 210-223, 235-245 | | | |
| Spy0115 | putative glutamyl- | 5-12, 19-27, 29-39, 59-67, 71-78, 80-88, 92-104, 107-124, | A: 3, C: 26 | 316-331 | 7, 157 |
| | aminopeptidase | 129-142, 158-168, 185-191, 218-226, 230-243, | | | |
| | | 256-267, 272-277, 283-291, 307-325, 331-344, 346-352 | | | |
| Spy0166 | Hypothetical protein | 6-28, 43-53, 60-76, 93-103 | I: 22, K: 7, N: 17, | 21-99 | 8, 158 |
| | | | O: 31, P: 5 | | |
| Spy0167 | Streptolysin O | 10-30, 120-126, 145-151, 159-169, 174-182, 191-196, | A: 118, B: 14, C: 18, | 9-264 | 9, 159 |
| | | 201-206, 214-220, 222-232, 254-272, 292-307, 313-323, | D: 37, F: 141, G: 79, | | |
| | | 332-353, 361-369, 389-396, 401-415, 428-439, | H: 92, L: 97, K: 123, | | |
| | | 465-481, 510-517, 560-568 | L: 5, M: 21, N: 225, | | |
| | | | O: 230, P: 265 | | |
| Spy0168 | Hypothetical protein | 5-29, 39-45, 107-128 | K: 4, N: 7 | 1-112 | 10, 160 |
| Spy0171 | hypothetical protein | 4-38, 42-50, 54-60, 65-71, 91-102 | H: 2 | 21-56 | 11, 161 |
| Spy0183 | putative glycine | 4-13, 19-25, 41-51, 54-62, 68-75, 79-89, 109-122, | C: 6 | 23-39 | 12, 162 |
| | betaine/proline ABC | 130-136, 172-189, 192-198, 217-224, 262-268, 270-276, | | | |
| | transporter | 281-298, 315-324, 333-342, 353-370, 376-391 | | | |
| Spy0230 | putative ABC | 6-41, 49-58, 62-103, 117-124, 147-166, 173-194, 204-211, | C: 46 | 474-489 | 13, 163 |
| | transporter (ATP- | 221-229, 255-261, 269-284, 288-310, 319-325, | | | |
| | binding protein) | 348-380, 383-389, 402-410, 424-443, 467-479, 496-517, | | | |
| | | 535-553, 555-565, 574-581, 583-591 | | | |
| Spy0269 | putative surface | 8-35, 52-57, 66-73, 81-88, 108-114, 125-131, 160-167, | A: 2, B: 12, D: 3, | 37-241 | 14, 164 |
| | exclusion protein | 174-180, 230-235, 237-249, 254-262, 278-285, 308-314, | F: 11, H: 5, N: 6 | 409-534 | |
| | | 321-326, 344-353, 358-372, 376-383, 393-411, | | 582-604 | |
| | | 439-446, 453-464, 471-480, 485-492, 502-508, 523-529, | | 743-804 | |
| | | 533-556, 558-563, 567-584, 589-597, 605-619, | | | |
| | | 625-645, 647-666, 671-678, 690-714, 721-728, 741-763, | | | |
| | | 766-773, 777-787, 792-802, 809-823, 849-864 | | | |
| Spy0287 | conserved | 4-17, 24-36, 38-44, 59-67, 72-90, 92-121, 126-149, | K: 1 | 202-337 | 15, 165 |
| | hypothetical protein | 151-159, 161-175, 197-215, 217-227, 241-247, 257-264, | | | |
| | | 266-275, 277-284, 293-307, 315-321, 330-337, | | | |
| | | 345-350, 357-366, 385-416 | | | |
| Spy0292 | penicillin-binding | 4-20, 22-46, 49-70, 80-89, 96-103, 105-119, 123-129, | F: 2 | 1-48 | 16, 166 |
| | protein (D-alanyl-D- | 153-160, 181-223, 227-233, 236-243, 248-255, 261-269, | | | |
| | alanine car | 274-279, 283-299, 305-313, 315-332, 339-344, | | | |
| | | 349-362, 365-373, 380-388, 391-397, 402-407 | | | |
| Spy0295 | oligopeptidepermease | 18-37, 41-63, 100-106, 109-151, 153-167, 170-197, | A: 3 | 203-217 | 17, 167 |
| | | 199-207, 212-229, 232-253, 273-297 | | | |
| Spy0348 | putative | 20-26, 54-61, 80-88, 94-101, 113-119, 128-136, 138-144, | D: 5, I: 3, M: 3, P: 3 | 261-273 | 18, 168 |
| | aminodeoxychorismate | 156-188, 193-201, 209-217, 221-229, 239-244, | | | |
| | lyase | 251-257, 270-278, 281-290, 308-315, 319-332, 339-352, | | | |
| | | 370-381, 388-400, 411-417, 426-435, 468-482, | | | |
| | | 488-497, 499-506, 512-521 | | | |
| Spy0416 | putative cell envelope | 6-12, 16-36, 50-56, 86-92, 115-125, 143-152, 163-172, | A: 3, B: 4, C: 30, | 1-414 | 19, 169 |
| | serine proteinase | 193-203, 235-244, 280-289, 302-315, 325-348, 370-379, | D: 13, F: 138, | 443-614 | |
| | | 399-405, 411-417, 419-429, 441-449, 463-472, | G: 120, H: 101, I: 9, | 997-1392 | |
| | | 482-490, 500-516, 536-543, 561-569, 587-594, 620-636, | K: 14, M: 2, N: 15, | | |
| | | 647-653, 659-664, 677-685, 687-693, 713-719, | O: 8, P: 19 | | |
| | | 733-740, 746-754, 756-779, 792-799, 808-817, 822-828, | | | |
| | | 851-865, 902-908, 920-938, 946-952, 969-976, | | | |
| | | 988-1005, 1018-1027, 1045-1057, 1063-1069, 1071-1078, | | | |
| | | 1090-1099, 1101-1109, 1113-1127, 1130-1137, | | | |
| | | 1162-1174, 1211-1221, 1234-1242, 1261-1268, 1278-1284, | | | |
| | | 1312-1317, 1319-1326, 1345-1353, 1366-1378, | | | |
| | | 1382-1394, 1396-1413, 1415-1424, 1442-1457, 1467-1474, | | | |
| | | 1482-1490, 1492-1530, 1537-1549, 1559-1576, | | | |
| | | 1611-1616, 1624-1641 | | | |
| Spy0430 | hypothetical protein | 14-42, 70-75, 90-100, 158-181 | B: 7, I: 10, P: 18 | 1-164 | 20, 170 |
| Spy0433 | hypothetical protein | 4-21, 30-36, 54-82, 89-97, 105-118, 138-147 | A: 138, B: 8, C: 67, | 126-207 | 21, 171 |
| | | | D: 11, E: 13, F: 35, | | |
| | | | G: 10, H: 5, M: 8 | | |
| Spy0437 | Hypothetical protein | 4-21, 31-66, 96-104, 106-113, 131-142 | A: 29, B: 10, C: 21, | 180-204 | 22, 172 |
| | | | D: 24, E: 15 | | |
| Spy0469 | putative 42 kDa | 5-23, 31-36, 38-55, 65-74, 79-88, 101-129, 131-154, | B: 5, F: 77, I: 8, | 11-197 | 23, 173 |
| | protein | 156-165, 183-194, 225-237, 245-261, 264-271, 279-284, | K: 15, M: 3, N: 17, | 204-219 | |
| | | 287-297, 313-319, 327-336, 343-363, 380-386 | O: 20 | 258-372 | |
| Spy0488 | hypothetical protein | 4-20, 34-41, 71-86, 100-110, 113-124, 133-143, 150-158, | A: 17, B: 11, C: 23, | 195-289 | 24, 174 |
| | | 160-166, 175-182, 191-197, 213-223, 233-239, | D: 12, E: 4, G: 4, | | |
| | | 259-278, 298-322 | H: 7 | | |
| Spy0515 | Putative sugar | 4-10, 21-35, 44-52, 54-62, 67-73, 87-103, 106-135, | B: 5, I: 3 | 12-130 | 25, 175 |
| | transferase | 161-174, 177-192, 200-209, 216-223, 249-298, | | | |
| | | 304-312, 315-329 | | | |
| Spy0580 | conserved | 10-27, 33-38, 48-55, 70-76, 96-107, 119-133, 141-147, | C: 5 | 434-444 | 26, 176 |
| | hypothetical protein | 151-165, 183-190, 197-210, 228-236, 245-250, 266-272, | | | |
| | | 289-295, 297-306, 308-315, 323-352, 357-371, | | | |
| | | 381-390, 394-401, 404-415, 417-425, 427-462, 466-483, | | | |
| | | 485-496, 502-507, 520-529, 531-541, 553-570, | | | |
| | | 577-588, 591-596, 600-610, 619-632, 642-665, 671-692, | | | |
| | | 694-707 | | | |
| Spy0621 | conserved | 6-14, 16-25, 36-46, 52-70, 83-111, 129-138, 140-149, | C: 3 | 360-375 | 27, 177 |
| | hypothetical protein | 153-166, 169-181, 188-206, 212-220, 223-259, 261-269, | | | |
| | | 274-282, 286-293, 297-306, 313-319, 329-341, | | | |
| | | 343-359, 377-390, 409-415, 425-430 | | | |
| Spy0630 | putative PTS | 4-26, 28-48, 54-62, 88-121, 147-162, 164-201, 203-237, | C: 2 | 254-260 | 28, 178 |
| | dependent N-acetyl- | 245-251 | | | |
| | galactosamine-IIC | | | | |
| Spy0681 | hypothetical protein, | 12-21, 26-32, 66-72, 87-93, 98-112, 125-149, 179-203, | A: 8 | 369-382 | 29, 179 |
| | phage associated | 209-226, 233-242, 249-261, 266-271, 273-289, 293-318, | | | |
| | | 346-354, 360-371, 391-400 | | | |
| Spy0683 | putative minor capsid | 11-38, 44-65, 70-87, 129-135, 140-163, 171-177, 225-232, | B: 11, D: 4 | 270-312 | 30, 180 |
| | protein, phage | 238-249, 258-266, 271-280, 284-291, 295-300, | | | |
| | associated | 329-337, 344-352, 405-412, 416-424, 426-434, 436-455, | | | |
| | | 462-475, 478-487 | | | |
| Spy0702 | Hypothetical protein | 5-17, 34-45, 59-69, 82-88, 117-129, 137-142, | L: 2 | 486-598 | 31, 181 |
| | | 158-165, 180-195, 201-206, 219-226, 241-260, | | | |
| | | 269-279, 292-305, 312-321, 341-347, 362-381, | | | |
| | | 396-410, 413-432, 434-445, 447-453, 482-487, | | | |
| | | 492-499, 507-516, 546-552, 556-565, 587-604 | | | |
| Spy0710 | conserved | 4-15, 17-32, 40-47, 67-78, 90-98, 101-107, 111-136, | B: 10 | 378-396 | 32, 182 |
| | hypothetical protein, | 161-171, 184-198, 208-214, 234-245, 247-254, 272-279, | | | |
| | phage associated | 288-298, 303-310, 315-320, 327-333, 338-349, | | | |
| | | 364-374 | | | |
| Spy0711 | pyrogenic exotoxin C | 5-27, 33-49, 51-57, 74-81, 95-107, 130-137, 148-157, | K: 2 | 75-235 | 33, 183 |
| | precursor, phage | 173-184 | | | |
| | associated (speC) | | | | |
| Spy0720 | conserved | 6-23, 47-53, 57-63, 75-82, 97-105, 113-122, 124-134, | D: 2 | 30-51 | 34, 184 |
| | hypothetical protein | 142-153, 159-164, 169-179, 181-187, 192-208, 215-243, | | | |
| | | 247-257, 285-290, 303-310 | | | |
| Spy0727 | putative DNA gyrase, | 17-29, 44-52, 59-73, 77-83, 86-92, 97-110, 118-153, | M: 26 | 208-219 | 35, 185 |
| | subunit B | 156-166, 173-179, 192-209, 225-231, 234-240, | | | |
| | | 245-251, 260-268, 274-279, 297-306, 328-340, | | | |
| | | 353-360, 369-382, 384-397, 414-423, 431-436, | | | |
| | | 452-465, 492-498, 500-508, 516-552, 554-560, | | | |
| | | 568-574, 580-586, 609-617, 620-626, 641-647 | | | |
| Spy0737 | putative extracellular | 4-26, 32-45, 58-72, 111-119, 137-143, 146-159, 187-193, | B: 5, E: 3, K: 11 | 396-533 | 36, 186 |
| | matrix binding | 221-231, 235-242, 250-273, 290-304, 311-321, | | 1342-1502 | |
| | protein | 326-339, 341-347, 354-368, 397-403, 412-419, 426-432, | | 1672-1920 | |
| | | 487-506, 580-592, 619-628, 663-685, 707-716, | | | |
| | | 743-751, 770-776, 787-792, 850-859, 866-873, 882-888, | | | |
| | | 922-931, 957-963, 975-981, 983-989, 1000-1008, | | | |
| | | 1023-1029, 1058-1064, 1089-1099, 1107-1114, 1139-1145, | | | |
| | | 1147-1156, 1217-1226, 1276-1281, 1329-1335, | | | |
| | | 1355-1366, 1382-1394, 1410-1416, 1418-1424, 1443-1451, | | | |
| | | 1461-1469, 1483-1489, 1491-1501, 1515-1522, | | | |
| | | 1538-1544, 1549-1561, 1587-1593, 1603-1613, 1625-1630, | | | |
| | | 1636-1641, 1684-1690, 1706-1723, 1765-1771, | | | |
| | | 1787-1804, 1850-1857, 1863-1894, 1897-1910, 1926-1935, | | | |
| | | 1937-1943, 1960-1983, 1991-2005, 2008-2014, | | | |
| | | 2018-2039 | | | |
| Spy0747 | extracellular nuclease | 4-25, 45-50, 53-65, 79-85, 87-92, 99-109, 126-137, | A: 72, B: 17, H: 6, | 1-113 | 37, 187 |
| | | 141-148, 156-183, 190-203, 212-217, 221-228, 235-242, | O: 3 | 210-232 | |
| | | 247-277, 287-293, 300-319, 321-330, 341-361, | | 250-423 | |
| | | 378-389, 394-406, 437-449, 455-461, 472-478, 482-491, | | 536-564 | |
| | | 507-522, 544-554, 576-582, 587-593, 611-621, | | | |
| | | 626-632, 649-661, 679-685, 696-704, 706-716, 726-736, | | | |
| | | 740-751, 759-766, 786-792, 797-802, 810-822, | | | |
| | | 824-832, 843-852, 863-869, 874-879, 882-905 | | | |
| Spy0777 | putative ATP- | 4-16, 33-39, 43-49, 54-85, 107-123, 131-147, 157-169, | C: 4, E: 2 | 617-635 | 38, 188 |
| | dependent | 177-187, 198-209, 220-230, 238-248, 277-286, 293-301, | | | |
| | exonuclease, subunit A | 303-315, 319-379, 383-393, 402-414, 426-432, | | | |
| | | 439-449, 470-478, 483-497, 502-535, 552-566, 571-582, | | | |
| | | 596-601, 608-620, 631-643, 651-656, 663-678, | | | |
| | | 680-699, 705-717, 724-732, 738-748, 756-763, 766-772, | | | |
| | | 776-791, 796-810, 819-827, 829-841, 847-861, | | | |
| | | 866-871, 876-882, 887-894, 909-934, 941-947, 957-969, | | | |
| | | 986-994, 998-1028, 1033-1070, 1073-1080, 1090-1096, | | | |
| | | 1098-1132, 1134-1159, 1164-1172, 1174-1201 | | | |
| Spy0789 | putative ABC- | 7-25, 30-40, 42-64, 70-77, 85-118, 120-166, 169-199, | A: 3 | 190-203 | 39, 189 |
| | transporter (permease | 202-213, 222-244 | | | |
| | protein | | | | |
| Spy0839 | putative | 4-11, 15-53, 55-93, 95-113, 120-159, 164-200, 210-243, | A: 7, D: 2 | 385-398 | 40, 190 |
| | glycerophosphodiester | 250-258, 261-283, 298-319, 327-340, 356-366, | | | |
| | phosphodieste | 369-376, 380-386, 394-406, 409-421, 425-435, 442-454, | | | |
| | | 461-472, 480-490, 494-505, 507-514, 521-527, | | | |
| | | 533-544, 566-574 | | | |
| Spy0843 | cell surface protein | 5-36, 66-72, 120-127, 146-152, 159-168, 172-184, | A: 11, B: 3, C: 5, | 12-190 | 41, 191 |
| | | 205-210, 221-232, 234-243, 251-275, 295-305, 325-332, | D: 4, F: 50, H: 19, | 276-283 | |
| | | 367-373, 470-479, 482-487, 520-548, 592-600, | G: 49, L: 112, K: 102, | 666-806 | |
| | | 605-615, 627-642, 655-662, 664-698, 718-725, 734-763, | L: 10, M: 3, N: 213, | | |
| | | 776-784, 798-809, 811-842, 845-852, 867-872, | O: 188, P: 310 | | |
| | | 879-888, 900-928, 933-940, 972-977, 982-1003 | | | |
| Spy0872 | putative secreted 5′- | 4-38, 63-68, 100-114, 160-173, 183-192, 195-210, | A: 6, D: 2, F: 5, | 30-80 | 42, 192 |
| | nucleotidase | 212-219, 221-238, 240-256, 258-266, 274-290, 301-311, | H: 14, I: 9, K: 10, | 89-105 | |
| | | 313-319, 332-341, 357-363, 395-401, 405-410, | L: 1, N: 16, O: 12 | 111-151 | |
| | | 420-426, 435-450, 453-461, 468-475, 491-498, 510-518, | | | |
| | | 529-537, 545-552, 585-592, 602-611, 634-639, | | | |
| | | 650-664 | | | |
| Spy0895 | histidine protein | 7-29, 31-39, 47-54, 63-74, 81-94, 97-117, 122-127, | C: 11 | 195-203 | 43, 193 |
| | kinase | 146-157, 168-192, 195-204, 216-240, 251-259 | | | |
| Spy0972 | putative terminase, | 5-16, 28-34, 46-65, 79-94, 98-105, 107-113, 120-134, | B: 2 | 32-50 | 44, 194 |
| | large subunit - phage | 147-158, 163-172, 180-186, 226-233, 237-251, 253-259, | | | |
| | | 275-285, 287-294, 302-308, 315-321, 334-344, | | | |
| | | 360-371, 399-412, 420-426 | | | |
| Spy0981 | hypothetical protein - | 8-20, 30-36, 71-79, 90-96, 106-117, 125-138, 141-147, | A: 7, B: 2 | 75-90 | 45, 195 |
| | phage associated | 166-174 | | | |
| Spy1008 | streptococcal exotoxin | 4-13, 15-33, 43-52, 63-85, 98-114, 131-139, 146-174, | C: 11 | 69-88 | 46, 196 |
| | H precursor (speH) | 186-192, 198-206, 227-233 | | | |
| Spy1032 | extracellular | 4-22, 29-35, 59-68, 153-170, 213-219, 224-238, 240-246, | B: 3, K: 3, M: 5 | 96-230 | 47, 197 |
| | hyaluronate lyase | 263-270, 285-292, 301-321, 327-346, 356-371, | | 361-491 | |
| | | 389-405, 411-418, 421-427, 430-437, 450-467, 472-477, | | 572-585 | |
| | | 482-487, 513-518, 531-538, 569-576, 606-614, | | | |
| | | 637-657, 662-667, 673-690, 743-753, 760-767, 770-777, | | | |
| | | 786-802 | | | |
| Spy1054 | putative collagen-like | 4-12, 21-36, 48-55, 74-82, 121-127, 195-203, 207-228, | A: 71, B: 13, C: 233, | 102-210 | 48, 198 |
| | protein (SclC) | 247-262, 269-278, 280-289 | D: 41, E: 163, | | |
| | | | F: 200, G: 442, | | |
| | | | H: 129, N: 3 | | |
| Spy1063 | putative periplasmic- | 13-20, 23-31, 38-44, 78-107, 110-118, 122-144, 151-164, | A: 4 | 240-248 | 49, 199 |
| | iron-binding protein | 176-182, 190-198, 209-216, 219-243, 251-256, | | | |
| | | 289-304, 306-313 | | | |
| Spy1162 | putative ribonuclease | 5-26, 34-48, 57-77, 84-102, 116-132, 139-145, 150-162, | B: 3, C: 5 | 182-198 | 50, 200 |
| | HII | 165-173, 176-187, 192-205, 216-221, 234-248, | | | |
| | | 250-260 | | | |
| Spy1206 | putative ABC | 10-19, 26-44, 53-62, 69-87, 90-96, 121-127, 141-146, | A: 2 | 41-56 | 51, 201 |
| | transporter | 148-158, 175-193, 204-259, 307-313, 334-348, 360-365, | | | |
| | | 370-401, 411-439, 441-450, 455-462, 467-472, | | | |
| | | 488-504 | | | |
| Spy1228 | Putative lipoprotein | 5-21, 36-42, 90-116, 123-130, 138-144, 146-157, | M: 33 | 202-217 | 52, 202 |
| | | 184-201, 213-228, 252-259, 277-297, 308-313, | | | |
| | | 318-323, 327-333 | | | |
| Spy1245 | putative phosphate | 6-26, 33-51, 72-90, 97-131, 147-154, 164-171, | I: 3, K: 3 | 1-127 | 53, 203 |
| | ABC transporter | 187-216, 231-236, 260-269, 275-283 | | | |
| Spy1315 | hypothetical protein | 4-22, 24-38, 44-58, 72-88, 99-108, 110-117, 123-129, | B: 4 | 297-458 | 54, 204 |
| | | 131-137, 142-147, 167-178, 181-190, 206-214, 217-223, | | | |
| | | 271-282, 290-305, 320-327, 329-336, 343-352, | | | |
| | | 354-364, 396-402, 425-434, 451-456, 471-477, 485-491, | | | |
| | | 515-541, 544-583, 595-609, 611-626, 644-656, | | | |
| | | 660-681, 683-691, 695-718 | | | |
| Spy1357 | protein GRAB | 5-43, 92-102, 107-116, 120-130, 137-144, 155-163, | G: 27, H: 8, K: 2, | 24-135 | 55, 205 |
| | (protein G-related | 169-174, 193-213 | N: 4 | | |
| | alpha 2M-binding p | | | | |
| SPy1361 | putative internalin A | 4-25, 61-69, 73-85, 88-95, 97-109, 111-130, 135-147, | F: 21, G: 26, H: 6, | 176-330 | 56, 206 |
| | precursor | 150-157, 159-179, 182-201, 206-212, 224-248, 253-260, | K: 4, N: 5 | | |
| | | 287-295, 314-331, 338-344, 365-376, 396-405, | | | |
| | | 413-422, 424-430, 432-449, 478-485, 487-494, 503-517, | | | |
| | | 522-536, 544-560, 564-578, 585-590, 597-613, | | | |
| | | 615-623, 629-636, 640-649, 662-671, 713-721 | | | |
| Spy1371 | putative NADP- | 31-37, 41-52, 58-79, 82-105, 133-179, 184-193, 199-205, | D: 14, H: 3 | 46-62 | 57, 207 |
| | dependent | 209-226, 256-277, 281-295, 297-314, 322-328, | | 296-341 | |
| | glyceraldehyde-3- | 331-337, 359-367, 379-395, 403-409, 417-432, 442-447, | | | |
| | phosphate | 451-460, 466-472 | | | |
| | dehydrogenase | | | | |
| Spy1375 | putative | 23-29, 56-63, 67-74, 96-108, 122-132, 139-146, 152-159, | A: 2 | 667-684 | 58, 208 |
| | ribonucleotide | 167-178, 189-196, 214-231, 247-265, 274-293, | | | |
| | reductase alpha-c | 301-309, 326-332, 356-363, 378-395, 406-412, 436-442, | | | |
| | | 445-451, 465-479, 487-501, 528-555, 567-581, | | | |
| | | 583-599, 610-617, 622-629, 638-662, 681-686, 694-700, | | | |
| | | 711-716 | | | |
| Spy1389 | putative alanyl-tRNA | 20-51, 53-59, 109-115, 140-154, 185-191, 201-209, | B: 2, P: 3 | 258-416 | 59, 209 |
| | synthetase | 212-218, 234-243, 253-263, 277-290, 303-313, 327-337, | | | |
| | | 342-349, 374-382, 394-410, 436-442, 464-477, | | | |
| | | 486-499, 521-530, 536-550, 560-566, 569-583, 652-672, | | | |
| | | 680-686, 698-704, 718-746, 758-770, 774-788, | | | |
| | | 802-827, 835-842, 861-869 | | | |
| Spy1390 | putative protease | 7-25, 39-45, 59-70, 92-108, 116-127, 161-168, 202-211, | A: 3, B: 2, D: 3 | 278-295 | 60, 210 |
| | maturation protein | 217-227, 229-239, 254-262, 271-278, 291-300 | | | |
| Spy1422 | putative | 4-20, 27-33, 45-51, 53-62, 66-74, 81-88, 98-111, 124-130, | C: 2 | 183-195 | 61, 211 |
| | recombination protein | 136-144, 156-179, 183-191 | | | |
| Spy1436 | putative | 12-24, 27-33, 43-49, 55-71, 77-85, 122-131, 168-177, | K: 1 | 63-238 | 62, 212 |
| | deoxyribonuclease | 179-203, 209-214, 226-241 | | | |
| Spy1494 | hypothetical protein | 4-19, 37-50, 120-126, 131-137, 139-162, 177-195, | G: 3, I: 5, K: 6, M: 5, | 1-141 | 63, 213 |
| | | 200-209, 211-218, 233-256, 260-268, 271-283, 288-308 | N: 10, O: 6, P: 4 | | |
| Spy1523 | cell division protein | 11-17, 40-47, 57-63, 96-124, 141-162, 170-207, 223-235, | I: 2 | 231-368 | 64, 214 |
| | | 241-265, 271-277, 281-300, 312-318, 327-333, | | | |
| | | 373-379 | | | |
| Spy1536 | conserved | 9-33, 41-48, 57-79, 97-103, 113-138, 146-157, 165-186, | A: 19, C: 3 | 247-260 | 65, 215 |
| | hypothetical protein | 195-201, 209-215, 223-229, 237-247, 277-286, | | | |
| | | 290-297, 328-342 | | | |
| Spy1564 | conserved | 7-15, 39-45, 58-64, 79-84, 97-127, 130-141, 163-176, | C: 4 | 64-72 | 66, 216 |
| | hypothetical protein | 195-203, 216-225, 235-247, 254-264, 271-279 | | | |
| Spy1604 | conserved | 4-12, 26-42, 46-65, 73-80, 82-94, 116-125, 135-146, | B: 2, K: 2 | 222-362 | 67, 217 |
| | hypothetical protein | 167-173, 183-190, 232-271, 274-282, 300-306, 320-343, | | 756-896 | |
| | | 351-362, 373-383, 385-391, 402-409, 414-426, | | | |
| | | 434-455, 460-466, 473-481, 485-503, 519-525, 533-542, | | | |
| | | 554-565, 599-624, 645-651, 675-693, 717-725, | | | |
| | | 751-758, 767-785, 792-797, 801-809, 819-825, 831-836, | | | |
| | | 859-869, 890-897 | | | |
| Spy1607 | conserved | 11-17, 22-28, 52-69, 73-83, 86-97, 123-148, 150-164, | D: 5 | 153-170 | 68, 218 |
| | hypothetical protein | 166-177, 179-186, 188-199, 219-225, 229-243, 250-255 | | | |
| Spy1615 | putative late | 4-61, 71-80, 83-90, 92-128, 133-153, 167-182, 184-192, | C: 4 | 56-73 | 69, 219 |
| | competence protein | 198-212 | | | |
| Spy1666 | conserved | 4-19, 26-37, 45-52, 58-66, 71-77, 84-92, 94-101, 107-118, | D: 2 | 298-312 | 70, 220 |
| | hypothetical protein | 120-133, 156-168, 170-179, 208-216, 228-238, | | | |
| | | 253-273, 280-296, 303-317, 326-334 | | | |
| Spy1727 | conserved | 7-13, 27-35, 38-56, 85-108, 113-121, 123-160, 163-169, | B: 5 | 141-157 | 71, 221 |
| | hypothetical protein | 172-183, 188-200, 206-211, 219-238, 247-254 | | | |
| Spy1785 | putative ATP- | 23-39, 45-73, 86-103, 107-115, 125-132, 137-146, | D: 3 | 433-440 | 72, 222 |
| | dependent DNA | 148-158, 160-168, 172-179, 185-192, 200-207, 210-224, | | 572-593 | |
| | helicase | 233-239, 246-255, 285-334, 338-352, 355-379, | | | |
| | | 383-389, 408-417, 423-429, 446-456, 460-473, 478-503, | | | |
| | | 522-540, 553-562, 568-577, 596-602, 620-636, | | | |
| | | 640-649, 655-663 | | | |
| Spy1798 | hypothetical protein | 4-42, 46-58, 64-76, 118-124, 130-137, 148-156, 164-169, | A: 12, I: 12, K: 7, | 17-319 | 73, 223 |
| | | 175-182, 187-194, 203-218, 220-227, 241-246, | N: 17, O: 13, P: 8 | 417-563 | |
| | | 254-259, 264-270, 275-289, 296-305, 309-314, 322-334, | | | |
| | | 342-354, 398-405, 419-426, 432-443, 462-475, | | | |
| | | 522-530, 552-567, 593-607, 618-634, 636-647, 653-658, | | | |
| | | 662-670, 681-695, 698-707, 709-720, 732-742, | | | |
| | | 767-792, 794-822, 828-842, 851-866, 881-890, 895-903, | | | |
| | | 928-934, 940-963, 978-986, 1003-1025, 1027-1043, | | | |
| | | 1058-1075, 1080-1087, 1095-1109, 1116-1122, | | | |
| | | 1133-1138, 1168-1174, 1179-1186, 1207-1214, 1248-1267 | | | |
| Spy1801 | immunogenic | 6-19, 23-33, 129-138, 140-150, 153-184, 190-198, | H: 2, I: 8, K: 6, N: 11 | 46-187 | 74, 224 |
| | secreted protein | 206-219, 235-245, 267-275, 284-289, 303-310, 322-328, | | | |
| | precursor homolog | 354-404, 407-413, 423-446, 453-462, 467-481, | | | |
| | | 491-500 | | | |
| Spy1813 | hypothetical protein | 4-34, 39-57, 78-86, 106-116, 141-151, 156-162, 165-172, | I: 16, K: 12, N: 6 | 21-244 | 75, 225 |
| | | 213-237, 252-260, 262-268, 272-279, 296-307, | | 381-499 | |
| | | 332-338, 397-403, 406-416, 431-446, 448-453, 464-470, | | 818-959 | |
| | | 503-515, 519-525, 534-540, 551-563, 578-593, | | | |
| | | 646-668, 693-699, 703-719, 738-744, 748-759, 771-777, | | | |
| | | 807-813, 840-847, 870-876, 897-903, 910-925, | | | |
| | | 967-976, 979-992 | | | |
| Spy1821 | putative translation | 19-29, 65-75, 90-109, 111-137, 155-165, 169-175 | C: 6 | 118-136 | 76, 226 |
| | elongation factor EF-P | | | | |
| Spy1916 | putative phospho- | 15-20, 30-36, 55-63, 73-79, 90-117, 120-127, 136-149, | C: 8 | 147-155 | 77, 227 |
| | beta-D-galactosidase | 166-188, 195-203, 211-223, 242-255, 264-269, 281-287, | | | |
| | | 325-330, 334-341, 348-366, 395-408, 423-429, | | | |
| | | 436-444, 452-465 | | | |
| Spy1972 | Pullulanase | 11-18, 21-53, 77-83, 91-98, 109-119, 142-163, 173-181, | A: 6, I: 2, K: 5, N: 9 | 74-438 | 78, 228 |
| | | 193-208, 216-227, 238-255, 261-268, 274-286, | | | |
| | | 290-297, 308-315, 326-332, 352-359, 377-395, 399-406, | | | |
| | | 418-426, 428-438, 442-448, 458-465, 473-482, | | | |
| | | 488-499, 514-524, 543-553, 564-600, 623-632, 647-654, | | | |
| | | 660-669, 672-678, 710-723, 739-749, 787-793, | | | |
| | | 820-828, 838-860, 889-895, 901-907, 924-939, 956-962, | | | |
| | | 969-976, 991-999, 1012-1018, 1024-1029, 1035-1072, | | | |
| | | 1078-1091, 1142-1161 | | | |
| Spy1979 | streptokinase A | 4-31, 41-52, 58-63, 65-73, 83-88, 102-117, 123-130, | I: 6, M: 3, N: 10 | 156-420 | 79, 229 |
| | precursor | 150-172, 177-195, 207-217, 222-235, 247-253, 295-305, | | | |
| | | 315-328, 335-342, 359-365, 389-394, 404-413 | | | |
| Spy1983 | collagen-like surface | 4-42, 56-69, 98-108, 120-125, 210-216, 225-231, 276-285, | A: 81, B: 24, F: 19, | 79-348 | 80, 230 |
| | protein (SclD) | 304-310, 313-318, 322-343 | G: 41, I: 2, K: 2 | | |
| Spy1991 | anthranilate synthase | 12-21, 24-30, 42-50, 61-67, 69-85, 90-97, 110-143, | D: 2 | 53-70 | 81, 231 |
| | component II | 155-168 | | | |
| Spy2000 | surface lipoprotein | 4-26, 41-54, 71-78, 88-96, 116-127, 140-149, 151-158, | B: 3, N: 2 | 183-341 | 82, 232 |
| | | 161-175, 190-196, 201-208, 220-226, 240-247, 266-281, | | | |
| | | 298-305, 308-318, 321-329, 344-353, 370-378, | | | |
| | | 384-405, 418-426, 429-442, 457-463, 494-505, 514-522 | | | |
| Spy2006 | hypothetical protein | 4-27, 69-77, 79-101, 117-123, 126-142, 155-161, 171-186, | A: 15, B: 9, C: 5, | 92-231 | 83, 233 |
| | | 200-206, 213-231, 233-244, 258-263, 269-275, | D: 3, F: 18, G: 25, | 618-757 | |
| | | 315-331, 337-346, 349-372, 376-381, 401-410, 424-445, | H: 5, M: 10, N: 5 | | |
| | | 447-455, 463-470, 478-484, 520-536, 546-555, | | | |
| | | 558-569, 580-597, 603-618, 628-638, 648-660, 668-683, | | | |
| | | 717-723, 765-771, 781-788, 792-806, 812-822 | | | |
| Spy2009 | hypothetical protein | 11-47, 63-75, 108-117, 119-128, 133-143, 171-185, | B: 2, I: 7, K: 7, P: 2 | 41-170 | 84, 234 |
| | | 190-196, 226-232, 257-264, 278-283, 297-309, 332-338, | | | |
| | | 341-346, 351-358, 362-372 | | | |
| Spy2010 | C5A peptidase | 6-26, 50-56, 83-89, 108-114, 123-131, 172-181, 194-200, | A: 47, B: 10, D: 3, | 20-487 | 85, 235 |
| | precursor | 221-238, 241-259, 263-271, 284-292, 304-319, | F: 48, G: 20, H: 4, | 757-1153 | |
| | | 321-335, 353-358, 384-391, 408-417, 424-430, 442-448, | I: 6, K: 13, M: 5, | | |
| | | 459-466, 487-500, 514-528, 541-556, 572-578, | N: 10, P: 6 | | |
| | | 595-601, 605-613, 620-631, 634-648, 660-679, 686-693, | | | |
| | | 702-708, 716-725, 730-735, 749-755, 770-777, | | | |
| | | 805-811, 831-837, 843-851, 854-860, 863-869, 895-901, | | | |
| | | 904-914, 922-929, 933-938, 947-952, 956-963, | | | |
| | | 1000-1005, 1008-1014, 1021-1030, 1131-1137, 1154-1164, | | | |
| | | 1166-1174 | | | |
| Spy2016 | inhibitor of | 10-34, 67-78, 131-146, 160-175, 189-194, 201-214, | A: 11, B: 38, C: 16, | 26-74 | 86, 236 |
| | complement (Sic) | 239-250, 265-271, 296-305 | F: 56, G: 27, H: 13, | 91-100 | |
| | | | K: 5, N: 2, O: 3, | 105-303 | |
| | | | P: 14 | | |
| Spy2018 | M1-Protein | 9-15, 19-32, 109-122, 143-150, 171-180, 186-191, | A: 316, B: 26, | 10-223 | 87, 237 |
| | | 209-217, 223-229, 260-273, 302-315, 340-346, 353-359, | C: 107, D: 12, E: 49, | 231-251 | |
| | | 377-383, 389-406, 420-426, 460-480 | F: 88, G: 118, H: 6, | 264-297 | |
| | | | I: 7, K: 2, M: 48, N: 4 | 312-336 | |
| Spy2025 | immunogenic | 5-28, 76-81, 180-195, 203-209, 211-219, 227-234, | F: 7, G: 16, H: 7, | 22-344 | 88, 238 |
| | secreted protein | 242-252, 271-282, 317-325, 350-356, 358-364, 394-400, | K: 63, L: 2, N: 18, | | |
| | precursor | 405-413, 417-424, 430-436, 443-449, 462-482, | O: 42 | | |
| | | 488-498, 503-509, 525-537 | | | |
| Spy2039 | pyrogenic exotoxin B | 5-28, 42-54, 77-83, 86-93, 98-104, 120-127, 145-159, | I: 15, K: 3, N: 12 | 1-151 | 89, 239 |
| | | 166-176, 181-187, 189-197, 213-218, 230-237, 263-271, | | | |
| | | 285-291, 299-305, 326-346, 368-375, 390-395 | | | |
| Spy2043 | mitogenic factor MF1 | 6-34, 48-55, 58-64, 84-101, 121-127, 143-149, 153-159, | K: 1 | 91-263 | 90, 240 |
| | (speF) | 163-170, 173-181, 216-225, 227-240, 248-254, | | | |
| | | 275-290, 349-364, 375-410, 412-418, 432-438, 445-451, | | | |
| | | 465-475, 488-496, 505-515, 558-564, 571-579, | | | |
| | | 585-595, 604-613, 626-643, 652-659, 677-686, 688-696, | | | |
| | | 702-709, 731-747, 777-795, 820-828, 836-842, | | | |
| | | 845-856, 863-868, 874-882, 900-909, 926-943, 961-976, | | | |
| | | 980-986, 992-998, 1022-1034, 1044-1074, 1085-1096, | | | |
| | | 1101-1112, 1117-1123, 1130-1147, 1181-1187, | | | |
| | | 1204-1211, 1213-1223, 1226-1239, 1242-1249, 1265-1271, | | | |
| | | 1273-1293, 1300-1308, 1361-1367, 1378-1384, | | | |
| | | 1395-1406, 1420-1428, 1439-1446, 1454-1460, 1477-1487, | | | |
| | | 1509-1520, 1526-1536, 1557-1574, 1585-1596, | | | |
| | | 1605-1617, 1621-1627, 1631-1637, 1648-1654, 1675-1689, | | | |
| | | 1692-1698, 1700-1706, 1712-1719, 1743-1756 | | | |
| Spy2059 | penicillin-binding | 4-16, 75-90, 101-136, 138-144, 158-164, 171-177, | D: 2, E: 2 | 261-272 | 91, 241 |
| | protein 2a | 191-201, 214-222, 231-241, 284-290, 297-305, 311-321, | | | |
| | | 330-339, 352-369, 378-385, 403-412, 414-422, | | | |
| | | 428-435, 457-473, 503-521, 546-554, 562-568, 571-582, | | | |
| | | 589-594, 600-608, 626-635, 652-669, 687-702, | | | |
| | | 706-712, 718-724, 748-760, 770-775 | | | |
| Spy2110 | putative anaerobic | 4-19, 30-41, 46-57, 62-68, 75-92, 126-132, 149-156, | E: 7 | 541-551 | 92, 242 |
| | ribonucleoside- | 158-168, 171-184, 187-194, 210-216, 218-238, 245-253, | | | |
| | triphosphate | 306-312, 323-329, 340-351, 365-373, 384-391, | | | |
| | reductase | 399-405, 422-432, 454-465, 471-481, 502-519, 530-541, | | | |
| | | 550-562, 566-572, 576-582, 593-599, 620-634, | | | |
| | | 637-643, 645-651, 657-664, 688-701 | | | |
| Spy2127 | Hypothetical protein | 6-11, 17-25, 53-58, 80-86, 91-99, 101-113, 123-131, | I: 6, P: 2 | 84-254 | 93, 243 |
| | | 162-169, 181-188, 199-231, 245-252 | | | |
| Spy2191 | hypothetical protein | 13-30, 71-120, 125-137, 139-145, 184-199 | C: 20, E: 3, M: 5 | 61-78 | 94, 244 |
| Spy2211 | transmembrance | 9-30, 38-53, 63-70, 74-97, 103-150, 158-175, 183-217, | A: 3 | 568-580 | 95, 245 |
| | protein | 225-253, 260-268, 272-286, 290-341, 352-428, 434-450, | | | |
| | | 453-460, 469-478, 513-525, 527-534, 554-563, | | | |
| | | 586-600, 602-610, 624-640, 656-684, 707-729, 735-749, | | | |
| | | 757-763, 766-772, 779-788, 799-805, 807-815, | | | |
| | | 819-826, 831-855 | | | |
| ARF0450 | no homology | 11-21, 29-38 | A: 11 | 5-17 | 96, 246 |
| ARF0569 | no homology | none | A: 2 | 2-9 | 97, 247 |
| ARF0694 | no homology | 4-10, 16-28 | B: 7, D: 3, M: 3 | 7-18 | 98, 248 |
| | | | | 26-34 | |
| ARF0700 | No homology | 10-16 | M: 11 | 1-15 | 99, 249 |
| ARF1007 | No homology | none | B: 2 | 4-11 | 100, 250 |
| ARF1145 | No homology | 4-40, 42-51 | C: 9 | 37-53 | 101, 251 |
| ARF1208 | no homology | 4-21 | C: 1 | 22-29 | 102, 252 |
| ARF1262 | No homology | none | D: 2 | 2-11 | 103, 253 |
| ARF1294 | 39% with SA0131 | 9-17, 32-44 | D: 2 | 1-22 | 104, 254 |
| | (first 28 aa of 67 aa | | | | |
| | protein) | | | | |
| ARF1316 | no homology | 19-25, 27-32 | E: 19 | 15-34 | 105, 255 |
| ARF1352 | 38% with SA1142 (aa | 4-12, 15-22 | D: 4 | 11-33 | 106, 256 |
| | 265-295 of 358 | | | | |
| | protein) | | | | |
| ARF1481 | No homology | 10-17, 24-30, 39-46, 51-70 | C: 2 | 51-61 | 107, 257 |
| ARF1557 | No homology | none | C: 2 | 6-19 | 108, 258 |
| ARF1629 | 36% with SP0069 (aa | 6-11, 21-27, 31-54 | A: 4, B: 6 | 11-29 | 109, 259 |
| | 139-169 of 211 aa | | | | |
| | protein) | | | | |
| ARF1654 | no homology | 4-10, 13-45 | A: 2 | 11-35 | 110, 260 |
| ARF2027 | no homology | 4-14, 23-32 | D: 2 | 11-35 | 111, 261 |
| ARF2093 | putative elongation | 14-39, 45-51 | C: 3 | 15-29 | 112, 262 |
| | factor TS | | | | |
| ARF2207 | 38% with SF1006 (aa | 4-11, 14-28 | A: 117 | 4-17 | 113, 263 |
| | 7-37 of 67 aa protein) | | | | |
| CRF0038 | No homology | 4-16 | C: 6 | 2-16 | 114, 264 |
| CRF0122 | No homology | 4-10, 12-19, 39-50 | C: 2 | 6-22 | 115, 265 |
| CRF0406 | no homology | none | D: 5, E: 11 | 2-13 | 116, 266 |
| CRF0416 | No homology | 4-11, 22-65 | C: 42 | 3-19 | 117, 267 |
| CRF0507 | No homology | 17-23, 30-35, 39-46, 57-62 | B: 3, C: 4 | 30-49 | 118, 268 |
| CRF0549 | No homology | 4-19 | C: 6 | 14-22 | 119, 269 |
| CRF0569 | No homology | none | N: 35 | 2-9 | 120, 270 |
| CRF0628 | 34% (14 of 41) with | 7-18, 30-43 | A: 3 | 4-12 | 121, 271 |
| | conserved | | | | |
| | hypothetical protein | | | | |
| | of P. aeruginosa | | | | |
| CRF0727 | 40% (16 of 40) with | 4-30, 39-47 | N: 6 | 5-22 | 122, 272 |
| | transcriptional | | | | |
| | regulator of | | | | |
| | S. pneumoniae | | | | |
| | (70 aa, | | | | |
| | SP0584) | | | | |
| CRF0742 | 33% with SA0422 (aa | 6-15 | D: 7, E: 12 | 14-29 | 123, 273 |
| | 11-37 of | | | | |
| | 42 aa protein, | | | | |
| | listed as 280 aa | | | | |
| | protein) | | | | |
| CRF0784 | No homology | 4-34 | N: 9 | 23-35 | 124, 274 |
| CRF0854 | No homology | 4-36, 44-57, 65-72 | N: 14 | 14-27 | 125, 275 |
| CRF0875 | no homology | 4-18 | A: 4, D: 1 | 11-20 | 126, 276 |
| CRF0907 | Homology to | none | A: 39 | 5-19 | 127, 277 |
| | lysosomal trafficking | | | | |
| | regulator LYST | | | | |
| | [Homo sapiens] | | | | |
| CRF0979 | no homology | 18-36 | D: 21 | 6-20 | 128, 278 |
| CRF1068 | no homology | 4-10, 19-34, 41-84, 96-104 | C: 1, D: 3 | 50-63 | 129, 279 |
| CRF1152 | No homology | 4-9, 19-27 | C: 15 | 8-21 | 130, 280 |
| CRF1203 | No homology | 4-16, 18-28 | N: 3 | 22-30 | 131, 281 |
| CRF1225 | No homology | 4-15 | C: 8 | 21-35 | 132, 282 |
| CRF1236 | No homology | 4-17 | N: 3 | 3-13 | 133, 283 |
| CRF1362 | No homology | 4-12 | C: 6 | 4-18 | 134, 284 |
| CRF1524 | no homology | 4-24, 31-36 | D: 3 | 29-45 | 135, 285 |
| CRF1525 | No homology | 12-22, 34-49 | C: 2 | 21-32 | 136, 286 |
| CRF1527 | no homology | 4-17 | D: 4, E: 1 | 22-32 | 137, 287 |
| CRF1588 | No homology | 4-16, 25-42 | C: 2 | 7-28 | 138, 288 |
| CRF1649 | No homology | 4-10 | C: 3 | 7-20 | 139, 289 |
| CRF1749 | No homology | 4-11, 16-36, 39-54 | C: 15 | 28-44 | 140, 290 |
| CRF1903 | no homology | 5-20, 29-54 | A: 14 | 14-29 | 141, 291 |
| CRF1964 | no homology | 24-33 | A: 8 | 10-22 | 142, 292 |
| CRF2055 | no homology | 10-51, 54-61 | B: 1, F: 12, H: 14 | 43-64 | 143, 293 |
| CRF2091 | No homology | 7-13 | C: 2 | 2-17 | 144, 294 |
| CRF2096 | No homology | 11-20 | C: 4 | 6-20 | 145, 295 |
| CRF2104 | No homology | 4-30, 34-41 | C: 2 | 19-28 | 146, 296 |
| CRF2116 | No homology | n.d. | | 11-21 | 147, 297 |
| CRF2153 | no homology | 4-16, 21-26 | F: 2 | 9-38 | 148, 298 |
| NRF0001 | ARF in Oligo ABC | 4-12, 15-27, 30-42, 66-72 | A: 7, B: 1 | 10-24 | 149, 299 |
| | transporter (not | | | | |
| | annotated by TIGR), | | | | |
| | 33% with SA0643 (aa | | | | |
| | 107-162 of 469 aa | | | | |
| | protein) | | | | |
| NRF0003 | no homology | 8-17 | A: 23 | 11-20 | 150, 300 |

[0421] [image] TABLE 3
Gene distribution in S. pyogenes strains.

| | | | Amino acid | | Seq. |
|---|---|---|---|---|---|
| | | Gene distribution | substitutions (in | | ID (DNA, |
| ORF | Common name | (present of 50) | strain M89) | Homology (SP/EC) | Prot.) |
| Spy0012 | Hypothetical protein | 50 | 3/302 | SP0010 - 40%/None | 1, 151 |
| Spy0019 | putative secreted protein (cell | 50 | 0/300 | SP2216 - 44-49%/None | 2, 152 |
| | division and antibiotic | | | | |
| | tolerance) | | | | |
| Spy0025 | putative | 38 | 0/303 | SP0045 - 85%/24% | 3, 153 |
| | phosphoribosylformylglycina | | | | |
| | midine synthase II | | | | |
| Spy0031 | putative choline binding | 50 | 0/297 | SP2201 - 42% (cbpD)/None | 4, 154 |
| | protein | | | | |
| Spy0103 | putative competence protein | 50 | 0/81 | SP2051 - 41%/None | 5, 155 |
| Spy0112 | putative pyrroline | 50 | 3/235 | SP0933 - 32%/34% | 6, 156 |
| | carboxylate reductase | | | | |
| Spy0115 | putative glutamylaminopeptidase | 50 | 6/306 | SP1865 - 76%/30% | 7, 157 |
| Spy0166 | hypothetical protein | 50 | n.d. | None/None | 8, 158 |
| Spy0167 | Streptolysin O | 50 | 7/300 | SP1923 - 40% | 9, 159 |
| | | | | (Pneumolysin)/None | |
| Spy0168 | hypothetical protein | 8 | 19/126 | None/None | 10, 160 |
| Spy0171 | hypothetical protein | 18 | 8/95 | None/None | 11, 161 |
| Spy0183 | putative glycine | 50 | 0/297 | SP0151 - 39%/48% | 12, 162 |
| | betaine/proline ABC | | | | |
| | transporter | | | | |
| Spy0230 | putative ABC transporter | 50 | 1/299 | SP2073 - 64%/32% | 13, 163 |
| | (ATP-binding protein) | | | | |
| Spy0269 | putative surface exclusion | 50 | 1/303 | None/None | 14, 164 |
| | protein | | | | |
| Spy0287 | conserved hypothetical | 50 | 1/307 | SP0868 - 71%/19% | 15, 165 |
| | protein | | | | |
| Spy0292 | penicillin-binding protein (D- | 50 | 1/359 | SP0872 - 47%/27% | 16, 166 |
| | alanyl-D-alanine car | | | | |
| Spy0295 | oligopeptidepermease | 50 | 2/269 | SP1889 - 69%/24% | 17, 167 |
| Spy0348 | putative | 50 | 1/307 | SP1518 - 47%/25% | 18, 168 |
| | aminodeoxychorismate lyase | | | | |
| Spy0416 | putative cell envelope serine | 50 | 4/314 | SP0641 - 22%/None | 19, 169 |
| | proteinase | | | | |
| Spy0430 | hypothetical protein | 13 | 0/165# | None/None | 20, 170 |
| Spy0433 | hypothetical protein | 21 (27/49)¹ | 2/174# | None/None | 21, 171 |
| Spy0437 | Hypothetical protein | 19 (34/49)¹ | 0/106# | None/None | 22, 172 |
| Spy0469 | putative 42 kDa protein | 50 | 6/313 | SP2063 - 44% (LysM | 23, 173 |
| | | | | protein)/None | |
| Spy0488 | hypothetical protein | 50 | 9/178 | None/None | 24, 174 |
| Spy0515 | Putative sugar transferase | 50 | n.d. | SP1075 - 26%/None | 25, 175 |
| Spy0580 | conserved hypothetical | 50 | 0/297 | SP0908 - 72%/43% | 26, 176 |
| | protein | | | | |
| Spy0621 | conserved hypothetical | 50 | n.d. | SP1290 - 72%/None | 27, 177 |
| | protein | | | | |
| Spy0630 | putative PTS dependent N- | 50 | n.d. | SP0324 - 79%/30% | 28, 178 |
| | acetyl-galactosamine-IIC | | | | |
| Spy0681 | hypothetical protein, phage | 27 | 2/303# | None/None | 29, 179 |
| | associated | | | | |
| Spy0683 | putative minor capsid | 25 | 1/233 | None/None | 30, 180 |
| | protein, phage associated | | | | |
| Spy0702 | Hypothetical protein | 22 | n.d. | None/None | 31, 181 |
| Spy0710 | conserved hypothetical | 32 | 51/286# | None/36% in 122 of 313aa | 32, 182 |
| | protein, phage associated | | | | |
| Spy0711 | pyrogenic exotoxin C | 17 | 1/225 | None/None | 33, 183 |
| | precursor, phage associated | | | | |
| | (speC) | | | | |
| Spy0720 | conserved hypothetical | 50 | 2/270 | SP1298 - 60% (DHH 1 | 34, 184 |
| | protein | | | protein)/None | |
| Spy0727 | Putative DNA gyrase, | n.d. | n.d. | SP0806 - 80%/46% | 35, 185 |
| | subunit B | | | | |
| Spy0737 | putative extracellular matrix | 29 (48/49)¹ | 0/466# | None/27% in 340of 421aa | 36, 186 |
| | binding protein | | | | |
| Spy0747 | extracellular nuclease | 50 | 0/179 | None/None | 37, 187 |
| Spy0777 | putative ATP-dependent | 50 | 2/306 | SP1152 - 48%/22% | 38, 188 |
| | exonuclease, subunit A | | | | |
| Spy0789 | putative ABC-transporter | 50 | 1/231 | None/None | 39, 189 |
| | (permease protein | | | | |
| Spy0839 | putative | 50 | 1/301 | SP0994 - 24%/31% in 121 of | 40, 190 |
| | glycerophosphodiester | | | 358aa | |
| | phosphodieste | | | | |
| Spy0843 | cell surface protein | 50 | 3/312 | None/None | 41, 191 |
| Spy0872 | putative secreted 5′- | 50 | 2/309 | None/27% in 274 of 647aa | 42, 192 |
| | nucleotidase | | | | |
| Spy0895 | histidine protein kinase | 50 | 0/244 | None/None | 43, 193 |
| Spy0972 | putative terminase, large | 28 | 1/314# | None/None | 44, 194 |
| | subunit - phage | | | | |
| Spy0981 | hypothetical protein - phage | 23 | n.d. | None/None | 45, 195 |
| | associated | | | | |
| Spy1008 | streptococcal exotoxin H | 15 (14/49)¹ | 1/223# | None/None | 46, 196 |
| | precursor (speH) | | | | |
| Spy1032 | extracellular hyaluronate | 50 (175 of 175, | 3/311 | SP0314 - 51%/None | 47, 197 |
| | lyase | Hynes 2000) | | | |
| Spy1054 | putative collagen-like protein | 26, (45/49)¹ (50 of | n.d. | None/None | 48, 198 |
| | (SclC) | 50, but varying | | | |
| | | number of repeats; | | | |
| | | Lukomski, 2001) | | | |
| Spy1063 | putative periplasmic-iron- | 49/50 (49/49)¹ | 2/292# | SP0243 - 52%, iron ABC | 49, 199 |
| | binding protein | | | transporter/26% in 161 of | |
| | | | | 348aa | |
| Spy1162 | putative ribonuclease HII | 50 | 3/240 | SP1156 - 67%/46% | 50, 200 |
| Spy1206 | putative ABC transporter | 50 | 1/302 | SP0770 - 81%/30% | 51, 201 |
| Spy1228 | Putative lipoprotein | 49 | n.d. | SP0845 - 57%/None | 52, 202 |
| Spy1245 | Putative ABC transporter | 50 | n.d. | SP1400 - 64%/None | 53, 203 |
| Spy1315 | hypothetical protein | 50 | 4/305 | SP1241 - 64%/32% | 54, 204 |
| Spy1357 | protein GRAB (protein G- | 49; 11 of 12 strains | 9/226; insertion of | None/None | 55, 205 |
| | related alpha 2M-binding | (Rasmussen, 1999) | 28 aa | | |
| | protein) | | | | |
| Spy1361 | putative internalin A | 50 | 7/295 | SP1004 - 26% in 283 of | 56, 206 |
| | precursor | | | 1039/None | |
| Spy1371 | putative NADP-dependent | 50 | 2/308 | SP1119 - 71%/34% | 57, 207 |
| | glyceraldehyde-3-phosphate | | | | |
| | dehydrogenase | | | | |
| Spy1375 | putative ribonucleotide | 50 | 4/304 | SP1179 - 85%/49% | 58, 208 |
| | reductase alpha-c | | | | |
| Spy1389 | putative alanyl-tRNA | 50 | 0/309 | SP1383 - 74%/40% | 59, 209 |
| | synthetase | | | | |
| Spy1390 | putative protease maturation | 50 | 0/232 | SP0981 - 42%/None | 60, 210 |
| | protein | | | | |
| Spy1422 | putative recombination | n.d. | n.d. | SP1672 - 88%/64% | 61, 211 |
| | protein | | | | |
| Spy1436 | putative deoxyribonuclease | 25 | 0/243# | SP1964 - 29% in 181 of | 62, 212 |
| | | | | 274aa/None | |
| Spy1494 | hypothetical protein | 50 | 13/282 | None/None | 63, 213 |
| Spy1523 | cell division protein | 49 | 2/329 | SP0690 - 27%/None | 64, 214 |
| Spy1536 | conserved hypothetical | 50 | 9/280 | SP1967 - 57%/None | 65, 215 |
| | protein | | | | |
| Spy1564 | conserved hypothetical | 39 | n.d. | None/None | 66, 216 |
| | protein | | | | |
| Spy1604 | conserved hypothetical | 50 | 1/233 | SP2143 - 47%/28% | 67, 217 |
| | protein | | | | |
| Spy1607 | conserved hypothetical | 50 | 0/241 | SP1902 - 55%/None | 68, 218 |
| | protein | | | | |
| Spy1615 | putative late competence | 50 | 2/204 | SP2207 - 41%/None | 69, 219 |
| | protein | | | | |
| Spy1666 | conserved hypothetical | 50 | 2/305 | SP0334 (yllC) - 78%/40% | 70, 220 |
| | protein | | | | |
| Spy1727 | conserved hypothetical | 50 | 0/237 | SP0549 - 53%/None | 71, 221 |
| | protein | | | | |
| Spy1785 | putative ATP-dependent | 50 | 1/306 | SP1697 - 71%/37% | 72, 222 |
| | DNA helicase | | | | |
| Spy1798 | hypothetical protein | 50 | 2/128 | None/None | 73, 223 |
| Spy1801 | immunogenic secreted | 50 | 6/313; insertion of 6 | SP2216 - 33% in 119 of | 74, 224 |
| | protein precursor homolog | | aa | 392aa/None | |
| Spy1813 | hypothetical protein | 46 | 47/433; insertion of | None/None | 75, 225 |
| | | | 9, deletion of 1 aa | | |
| Spy1821 | putative translation | n.d. | n.d. | SP0435 - 94%/45% | 76, 226 |
| | elongation factor EF-P | | | | |
| Spy1916 | putative phospho-beta-D- | n.d. | n.d. | SP1184 - 91%/83% | 77, 227 |
| | galactosidase | | | | |
| Spy1972 | Pullulanase | 50 | 1/233 | SP0268 - 53%, SP1118 - | 78, 228 |
| | | | | 29%/25% in 352 of 657aa | |
| Spy1979 | streptokinase A precursor | 50 | 20.1% identical of | None/None | 79, 229 |
| | | | 309# | | |
| Spy1983 | collagen-like surface protein | 50, (50 of 50, but | n.d. | None/None | 80, 230 |
| | (SclD) | size variation | | | |
| | | according to | | | |
| | | Lukomski, 2000 | | | |
| Spy1991 | anthranilate synthase | 50 | 1/170 | SP1816 - 58%/47% | 81, 231 |
| | component II | | | | |
| Spy2000 | surface lipoprotein | 50 | 0/307 | None/27% in 389 of 524aa | 82, 232 |
| Spy2006 | hypothetical protein | 50 | 0/234 | SP1003 - 36%, SP1174 - 37%, | 83, 233 |
| | | | | SP1004 - 33%, SP1175 - | |
| | | | | 48%/None | |
| Spy2009 | hypothetical protein | 39 (38/49)¹ | 58/344; insertion of | None/None | 84, 234 |
| | | | 36, deletion of 4 aa | | |
| Spy2010 | C5A peptidase precursor | n.d. | n.d. | SP0641 - 23% in 783 of | 85, 235 |
| | | | | 2140aa/None | |
| Spy2016 | inhibitor of complement (Sic) | 47; mainly in M1 | 11/269# | None/None | 86, 236 |
| | | strains (Reid 2001) | | | |
| Spy2018 | M1-Protein | n.d. | n.d. | None/None | 87, 237 |
| Spy2025 | immunogenic secreted | 50 | 3/296 | SP2216 - 31% in 138 of | 88, 238 |
| | protein precursor | | | 392aa/None | |
| Spy2039 | pyrogenic exotoxin B | n.d. | n.d. | None/None | 89, 239 |
| Spy2043 | mitogenic factor MF1 (speF) | 50 | 0/247 | None/None | 90, 240 |
| Spy2059 | penicillin-binding protein 2a | 50 | 0/293 | SP2010 - 55% (pbp2A)/30% in | 91, 241 |
| | | | | 539 of 844aa | |
| Spy2110 | putative anaerobic | 50 | 0/311 | SP0202 - 80% (nrdD)/50% | 92, 242 |
| | ribonucleoside-triphosphate | | | | |
| | reductase | | | | |
| Spy2127 | Hypothetical protein | 1 | n.d. | None/None | 93, 243 |
| Spy2191 | hypothetical protein | 50 | 1/175 | None/None | 94, 244 |
| Spy2211 | transmembrane protein | 50 | 2/281 | SP2231 - 43%/None | 95, 245 |
| ARF0450 | hypothetical protein | 50 | 5/191 | None/None | 96, 246 |
| ARF0569 | hypothetical protein | n.d. | n.d. | None/None | 97, 247 |
| ARF0694 | hypothetical protein | 23 | 1/122# | None/None | 98, 248 |
| ARF0700 | hypothetical protein | n.d. | n.d. | None/None | 99, 249 |
| ARF1007 | hypothetical protein | n.d. | n.d. | None/None | 100, 250 |
| ARF1145 | hypothetical protein | n.d. | n.d. | None/None | 101, 251 |
| ARF1208 | hypothetical protein | n.d. | n.d. | None/None | 102, 252 |
| ARF1262 | hypothetical protein | n.d. | n.d. | None/None | 103, 253 |
| ARF1294 | hypothetical protein | 50 | 1/186 | 9% with SA0131 (first 28 aa | 104, 254 |
| | | | | of 67 aa protein) | |
| ARF1316 | hypothetical protein | n.d. | n.d. | None/None | 105, 255 |
| ARF1352 | hypothetical protein | n.d. | n.d. | 38% with SA1142 (aa 265-295 | 106, 256 |
| | | | | of 358 protein) | |
| ARF1481 | hypothetical protein | n.d. | n.d. | None/None | 107, 257 |
| ARF1557 | hypothetical protein | n.d. | n.d. | None/None | 108, 258 |
| ARF1629 | hypothetical protein | n.d. | n.d. | 36% with SP0069 (aa 139-169 | 109, 259 |
| | | | | of 211 aa protein) | |
| ARF1654 | hypothetical protein | n.d. | n.d. | None/None | 110, 260 |
| ARF2027 | hypothetical protein | n.d. | n.d. | None/None | 111, 261 |
| ARF2093 | hypothetical protein | n.d. | n.d. | None/None | 112, 262 |
| ARF2207 | hypothetical protein | 50 | n.d. | 38% with SP1006 (aa 7-37 of | 113, 263 |
| | | | | 67 aa protein) | |
| CRF0038 | hypothetical protein | n.d. | n.d. | None/None | 114, 264 |
| CRF0122 | hypothetical protein | n.d. | n.d. | None/None | 115, 265 |
| CRF0406 | hypothetical protein | n.d. | n.d. | None/None | 116, 266 |
| CRF0416 | hypothetical protein | n.d. | n.d. | None/None | 117, 267 |
| CRF0507 | hypothetical protein | n.d. | n.d. | None/None | 118, 268 |
| CRF0549 | hypothetical protein | n.d. | n.d. | None/None | 119, 269 |
| CRF0569 | hypothetical protein | n.d. | n.d. | None/None | 120, 270 |
| CRF0628 | hypothetical protein | n.d. | n.d. | None/None | 121, 271 |
| CRF0727 | hypothetical protein | n.d. | n.d. | 40% with SP0584 (aa21-60 of | 122, 272 |
| | | | | 70aa protein) | |
| CRF0742 | hypothetical protein | n.d. | n.d. | 33% with SA0422 (aa 11-37 of | 123, 273 |
| | | | | 42 aa protein, listed as 280 aa | |
| | | | | protein) | |
| CRF0784 | hypothetical protein | n.d. | n.d. | None/None | 124, 274 |
| CRF0854 | hypothetical protein | n.d. | n.d. | None/None | 125, 275 |
| CRF0875 | hypothetical protein | n.d. | n.d. | None/None | 126, 276 |
| CRF0907 | hypothetical protein | n.d. | n.d. | Homology to lysosomal | 127, 277 |
| | | | | trafficking regulator LYST | |
| | | | | [Homo sapiens] | |
| CRF0979 | hypothetical protein | n.d. | n.d. | None/None | 128, 278 |
| CRF1068 | hypothetical protein | 50 | 0/148 | None/None | 129, 279 |
| CRF1152 | hypothetical protein | n.d. | n.d. | None/None | 130, 280 |
| CRF1203 | hypothetical protein | n.d. | n.d. | None/None | 131, 281 |
| CRF1225 | hypothetical protein | n.d. | n.d. | None/None | 132, 282 |
| CRF1236 | hypothetical protein | n.d. | n.d. | None/None | 133, 283 |
| CRF1362 | hypothetical protein | n.d. | n.d. | None/None | 134, 284 |
| CRF1524 | hypothetical protein | n.d. | n.d. | None/None | 135, 285 |
| CRF1525 | hypothetical protein | n.d. | n.d. | None/None | 136, 286 |
| CRP1527 | hypothetical protein | n.d. | n.d. | None/None | 137, 287 |
| CRF1588 | hypothetical protein | n.d. | n.d. | None/None | 138, 288 |
| CRF1649 | hypothetical protein | n.d. | n.d. | None/None | 139, 289 |
| CRF1749 | hypothetical protein | n.d. | n.d. | None/None | 140, 290 |
| CRF1903 | hypothetical protein | 50 | 0/140 | None/None | 141, 291 |
| CRF1964 | hypothetical protein | n.d. | n.d. | None/None | 142, 292 |
| CRF2055 | hypothetical protein | n.d. | n.d. | None/None | 143, 293 |
| CRF2091 | hypothetical protein | n.d. | n.d. | None/None | 144, 294 |
| CRF2096 | hypothetical protein | n.d. | n.d. | None/None | 145, 295 |
| CRF2104 | hypothetical protein | n.d. | n.d. | None/None | 146, 296 |
| CRF2116 | hypothetical protein | n.d. | n.d. | None/None | 147, 297 |
| CRF2153 | hypothetical protein | n.d. | n.d. | None/None | 148, 298 |
| NRF0001 | hypothetical protein | 50 | 0/130 | ARF in Oligo ABC | 149, 299 |
| | | | | transporter (not annotated by | |
| | | | | TIGR), 33% with SA0643 (aa | |
| | | | | 107-162 of 469 aa protein) | |
| NRF0003 | hypothetical protein | n.d. | n.d. | None/None | 150, 300 |

[0422] TABLE 4
Recombinant proteins used for immunisation experiments in NMRI mice.

| | Length | Amino | | | | Total size of the |
|---|---|---|---|---|---|---|
| | (amino | acids^{A} | | | | fragment cloned |
| ORF | acids) | From | to | Solubility | Protection^{B} | (Kbp) |
| Spy0031 | 374 | 39 | 374 | Insoluble | 20% (10%, 40%) | 1.008 |
| Spy0103 | 108 | 2 | 108 | | 50% (10%, 80%) | 0.321 |
| Spy0269 | 873 | 36 | 873 | Soluble | 40% (40%, 70%)^{C} | 2.511 |
| Spy0292 | 410 | 22 | 410 | Insoluble | 70% (10%, 80%) | 1.164 |
| Spy0416A | 1647 | 33 | 867 | Soluble | 50% (10%, 40%) | 2.502 |
| Spy0416B | 1647 | 736 | 1617 | Solubilized | 0% (0%, 40%) | 2.646 |
| Spy0720 | 313 | 2 | 313 | Insoluble | 60% (10%, 80%) | 0.939 |
| Spy0872 | 670 | 27 | 640 | Solubilized | 60% (10%, 80%) | 1.839 |
| Spy1245 | 288 | 49 | 288 | Soluble | 20% (10%, 40%) | 0.717 |
| Spy1357 | 217 | 33 | 186 | Soluble | 40% (30%, 90%) | 0.459 |
| Spy1361 | 792 | 22 | 792 | Soluble | 60% (30%, 90%) | 2.31 |
| Spy1390 | 351 | 21 | 351 | | 60% (10%, 80%) | 0.99 |
| Spy1536 | 345 | 31 | 345 | | 20% (0%, 40%) | 0.942 |
| Spy1607 | 258 | 2 | 258 | | 40% (10%, 40%) | 0.771 |
| Spy1666 | 337 | 22 | 337 | Soluble | 50% (30%, 90%) | 0.945 |
| Spy1972 | 1165 | 45 | 500 | | 40% (30%, 90%) | 1.365 |
| Spy2000 | 542 | 24 | 542 | Soluble | 20% (30%, 90%) | 1.554 |
| Spy2025 | 541 | 27 | 541 | | 40% (40%, 70%) | 1.542 |
| Spy2191 | 204 | 36 | 204 | | 50% (10%, 80%) | 0.504 |

[0423] TABLE 5
Variability of antigens in strains of S. pyogenes.

| Antigen | Seq | Residue in | | Amino acid |
|---|---|---|---|---|
| name | ID | Antigen^{A} | Residue number | variations^{B} |
| Spy0031 | 154 | G | 126 | D |
| | | A | 192 | S |
| | | V | 233 | I |
| | | D | 328 | N |
| | | I | 338 | T |
| Spy0103 | 155 | none | | |
| Spy0269 | 164 | H | 97 | N |
| | | A | 150 | V |
| | | A | 168 | V |
| | | H | 482 | R |
| | | N | 485 | K |
| | | Q | 577 | E |
| | | A | 610 | V |
| | | L | 636 | M |
| | | E | 640 | K |
| | | P | 752 | S |
| | | I | 764 | V |
| | | D | 765 | E |
| | | K | 873 | R |
| Spy0292 | 166 | A | 214 | D |
| | | Y | 309 | S |
| | | T | 317 | N |
| | | V | 318 | C |
| | | K | 319 | Q |
| Spy0416 | 169 | V | 1 | M |
| | | F | 25 | M |
| | | L | 26 | M |
| | | V | 27 | M |
| | | S | 38 | T |
| | | M | 40 | T |
| | | A | 49 | T |
| | | S | 68 | P |
| | | L | 76 | P |
| | | S | 85 | P |
| | | D | 87 | G |
| | | S | 104 | P |
| | | S | 110 | P |
| | | D | 151^{C} | A, S, T, G |
| | | S | 164 | P |
| | | E | 215 | G |
| | | H | 279^{C} | A, S, T, G |
| | | T | 395 | I |
| | | D | 452 | N |
| | | N | 478 | K |
| | | G | 484 | D |
| | | A | 547 | V |
| | | S | 617^{C} | A, S, T, G |
| | | D | 723 | A |
| | | H | 749 | R |
| | | R | 770 | K |
| | | P | 787 | S |
| | | D | 804 | A |
| | | T | 874 | M |
| | | N | 913 | S |
| | | H | 991 | Y |
| | | N | 1080 | S |
| | | V | 1238 | A |
| | | D | 1313 | G |
| | | V | 1349 | M |
| | | A | 1393 | V |
| | | N | 1479 | K |
| | | I | 1487 | M |
| | | D | 1516 | G |
| | | N | 1555 | D |
| | | T | 1560 | A |
| | | S | 1599 | F |
| | | S | 1605 | T |
| | | T | 1617 | A |
| Spy0720 | 184 | A | 61 | T |
| | | I | 63 | M |
| | | K | 99 | Q |
| | | K | 109 | Q |
| | | N | 295 | S |
| Spy0872 | 192 | K | 178 | N |
| | | P | 181 | S |
| | | V | 253 | I |
| | | A | 393 | V |
| | | T | 600 | I |
| | | V | 605 | I |
| Spy1063 | 199 | N | 168 | S |
| | | A | 169 | S |
| | | D | 170 | E |
| | | A | 173 | E |
| | | M | 175 | V |
| | | V | 180 | L |
| | | N | 181 | S |
| | | E | 192 | D |
| | | Q | 195 | E |
| | | K | 228 | D |
| | | H | 243 | K |
| | | P | 245 | K |
| | | N | 246 | A |
| | | T | 248 | K |
| | | L | 252 | Q |
| | | M | 257 | I |
| | | R | 260 | S |
| | | Q | 277 | R |
| | | D | 284 | E |
| | | A | 287 | P |
| | | E | 289 | D |
| | | T | 290 | E |
| | | A | 292 | I |
| | | A | 299 | G |
| | | K | 303 | R |
| | | V | 309 | L |
| | | A | 310 | N |
| | | Q | 314 | R |
| | | R | 316 | H |
| | | Q | 317 | E |
| | | R | 318 | A |
| | | K | 321 | R |
| | | A | 322 | G |
| Spy1245 | 203 | L | 72 | M |
| | | A | 97 | P |
| | | Q | 213 | K |
| Spy1357 | 205 | C | 9 | Y |
| | | G | 48 | R |
| | | I | 87 | L |
| | | S | 91 | A |
| | | T | 102 | A |
| | | L | 105 | V |
| | | A | 111 | S |
| | | N | 117 | T |
| | | E | 139 | S, A |
| | | Q | 142 | K |
| | | S | 143 | A |
| | | N | 145 | T |
| | | W | 151 | L |
| | | A | 155 | D |
| | | T | 156 | N |
| | | P | 157 | A |
| | | I | 158 | T, A |
| | | A | 159 | S |
| | | L | 160 | D |
| | | D | 161 | A |
| | | V | 162 | L |
| | | K | 163 | E |
| | | K | 164 | A |
| | | T | 165 | L |
| | | K | 166 | A |
| | | T | 168 | Q |
| | | K | 169 | T |
| | | P | 170 | S, D |
| | | V | 171 | A |
| | | K | 173 | Q |
| | | K | 174 | S |
| | | G | 187 | S |
| | | A | 197 | T |
| | | V | 207 | A |
| Spy1361 | 206 | R | 129 | Q |
| | | P | 141 | S |
| | | L | 197 | P |
| | | A | 201 | V |
| | | D | 230 | A |
| | | S | 231 | N |
| | | D | 235 | N |
| | | P | 262 | L |
| | | T | 272 | N |
| | | Q | 274 | H |
| | | T | 302 | A |
| | | T | 308 | I |
| | | A | 346 | V |
| | | V | 354 | F |
| | | P | 389 | L |
| | | M | 391 | K |
| | | I | 427 | L |
| | | P | 431 | L |
| | | P | 503 | S |
| | | D | 645 | N |
| | | S | 696 | P |
| | | K | 738 | N |
| | | T | 757 | A |
| Spy1390 | 210 | N | 3 | Q |
| | | S | 4 | M |
| | | A | 9 | T |
| | | S | 10 | G |
| | | S | 16 | T |
| | | M | 18 | V |
| | | A | 19 | T |
| | | A | 21 | S |
| | | T | 26 | S |
| | | N | 27 | H |
| | | D | 28 | N |
| | | V | 32 | L |
| | | I | 33 | V |
| | | S | 41 | T |
| | | V | 54 | L |
| | | S | 55 | A |
| | | N | 61 | S |
| | | A | 70 | T |
| | | G | 73 | A |
| | | D | 74 | N |
| | | K | 78 | D |
| | | H | 86 | K |
| | | K | 87 | Q |
| | | E | 90 | D |
| | | A | 94 | T |
| | | S | 97 | K |
| | | A | 98 | T |
| | | A | 99 | V |
| | | S | 104 | G |
| | | F | 110 | Y |
| | | R | 112 | K |
| | | S | 116 | L |
| | | S | 117 | T |
| | | A | 127 | Q |
| | | K | 130 | N |
| | | L | 132 | I |
| | | T | 133 | S |
| | | T | 134 | K |
| | | Q | 135 | K |
| | | E | 136 | D |
| | | K | 138 | R |
| | | K | 139 | Q |
| | | E | 142 | D |
| | | S | 143 | A |
| | | A | 149 | T |
| | | V | 150 | A |
| | | M | 152 | I |
| | | I | 153 | M |
| | | T | 154 | Q |
| | | L | 155 | F |
| | | D | 156 | E |
| | | N | 157 | K |
| | | E | 158 | D |
| | | T | 160 | D |
| | | S | 163 | A |
| | | V | 164 | A |
| | | T | 176 | A |
| | | T | 184 | I |
| | | T | 185 | A |
| | | P | 186 | A |
| | | E | 187 | D |
| | | V | 190 | T |
| | | K | 193 | T |
| | | A | 198 | E |
| | | T | 199 | I |
| | | N | 200 | T |
| | | V | 201 | L |
| | | T | 203 | A |
| | | D | 204 | E |
| | | K | 207 | R |
| | | S | 211 | G |
| | | N | 213 | K |
| | | G | 216 | N |
| | | I | 217 | R |
| | | D | 219 | E |
| | | V | 220 | I |
| | | S | 222 | T |
| | | V | 223 | A |
| | | T | 227 | A |
| | | S | 228 | T |
| | | Y | 229 | S |
| | | Q | 230 | K |
| | | K | 231 | R |
| | | K | 232 | T |
| | | F | 233 | Y |
| | | Y | 234 | H |
| | | V | 236 | I |
| | | E | 243 | T |
| | | S | 246 | A |
| | | Q | 249 | K |
| | | E | 250 | A |
| | | E | 252 | A |
| | | A | 257 | D |
| | | I | 260 | V |
| | | A | 261 | T |
| | | E | 262 | G |
| | | S | 264 | L |
| | | M | 267 | P |
| | | N | 268 | D |
| | | N | 276 | K |
| | | Y | 297 | F |
| | | N | 299 | K |
| | | L | 300 | P |
| | | G | 301 | N |
| | | T | 304 | Q |
| | | K | 305 | P |
| | | A | 307 | Q |
| | | S | 308 | K |
| Spy1536 | 215 | none | | |
| Spy1607 | 218 | E | 21 | D |
| | | A | 91 | P |
| | | H | 194 | R |
| | | D | 204 | G, N |
| Spy1666 | 220 | K | 90 | Q |
| | | K | 302 | T |
| | | | S. peumoniae TIGR4 | |
| | | V | 37 | I |
| | | I | 42 | V |
| | | S | 56 | A |
| | | A | 60 | E |
| | | G | 67 | S |
| | | E | 69 | K |
| | | C | 74 | A |
| | | K | 80 | N |
| | | V | 87 | K |
| | | T | 88 | R |
| | | K | 90 | A, Q |
| | | S | 91 | P |
| | | D | 94 | E |
| | | Q | 97 | M |
| | | K | 109 | Q |
| | | R | 111 | C |
| | | T | 113 | R |
| | | A | 114 | E |
| | | L | 115 | A |
| | | D | 118 | Q |
| | | L | 124 | C |
| | | E | 136 | Q |
| | | Q | 145 | K |
| | | D | 154 | N |
| | | R | 155 | Q |
| | | Q | 156 | D |
| | | S | 157 | A |
| | | L | 158 | S |
| | | T | 167 | N |
| | | P | 169 | D |
| | | F | 170 | Y |
| | | N | 171 | H |
| | | K | 175 | R |
| | | A | 198 | E |
| | | I | 199 | V |
| | | L | 211 | I |
| | | A | 214 | L |
| | | A | 215 | V |
| | | D | 252 | Q |
| | | E | 255 | D |
| | | L | 256 | M |
| | | D | 287 | E |
| | | L | 294 | F |
| | | E | 297 | D |
| | | M | 299 | L |
| | | F | 303 | M |
| | | H | 315 | A |
| | | S | 316 | E |
| | | T | 319 | E |
| | | K | 322 | N |
| | | A | 324 | S |
| | | A | 332 | V |
| | | K | 333 | R |
| | | R | 336 | H |
| Spy1972 | 228 | V | 32 | M |
| | | L | 70 | F |
| | | M | 98 | I |
| | | K | 182 | R |
| | | F | 224 | S |
| | | D | 226 | E |
| | | H | 245 | P |
| | | P | 300 | L |
| | | R | 363 | K |
| | | K | 365 | T |
| | | T | 369 | A |
| | | A | 376 | T |
| | | R | 443 | K |
| | | V | 445 | L |
| | | A | 460 | T |
| | | V | 467 | I |
| | | D | 510 | V |
| | | A | 496 | T |
| | | T | 611 | K |
| | | T | 718 | A |
| | | G | 831 | S |
| | | A | 913 | V |
| | | Q | 930 | K |
| | | V | 1053 | A |
| | | E | 1079 | D |
| | | N | 1094 | D |
| | | T | 1102 | I |
| | | D | 1103 | G |
| | | I | 1149 | V |
| Spy2000 | 232 | K | 27 | N |
| | | S | 101 | L |
| | | V | 151 | I |
| | | D | 250 | S |
| | | P | 335 | S |
| | | A | 338 | P |
| | | V | 519 | I |
| Spy2025 | 238 | S | 33 | N |
| | | D | 46 | A |
| | | D | 49 | A |
| | | P | 54 | A |
| | | T | 78 | N |
| | | D | 107 | N |
| | | K | 109 | N |
| | | D | 112 | N |
| | | P | 119 | S |
| | | Q | 147 | P |
| | | T | 160 | I |
| | | D | 170 | E |
| | | I | 183 | N |
| | | I | 194 | A |
| | | G | 297 | E |
| | | S | 528 | R |
| Spy2191 | 244 | A | 70 | V |
| | | V | 93 | A |

1-37. (canceled)

38. A hyperimmune serum-reactive S. pyogenes antigen that is immunologically reactive with sera from a human having an S. pyogenes infection or an uninfected healthy human, the antigen comprising an isolated S. pyogenes polypeptide or peptide fragment thereof.

39. An S. pyogenes antigen according to claim 38, wherein the antigen is an isolated S. pyogenes polypeptide that is SPy0269 (SEQ ID NO. 164), Spy0292 (SEQ ID NO. 166), SPy0416 (SEQ ID NO. 169), SPy0488 (SEQ ID NO. 174), Spy0872 (SEQ ID NO. 192), SPy0895 (SEQ ID NO. 193), SPy1536 (SEQ ID NO. 215), SPy1666 (SEQ ID NO. 220), SPy1727 (SEQ ID NO. 221), or an antigenic fragment thereof.

40. An antigenic fragment of an S. pyogenes antigen according to claim 39, wherein the fragment comprises amino acids 37-241, 409-534, 582-604, 743-804, 8-35, 52-57, 66-73, 81-88, 108-114, 125-131, 160-167, 174-180, 230-235, 237-249, 254-262, 278-285, 308-314, 321-326, 344-353, 358-372, 376-383, 393-411, 439-446, 453-464, 471-480, 485-492, 502-508, 523-529, 533-556, 558-563, 567-584, 589-597, 605-619, 625-645, 647-666, 671-678, 690-714, 721-728, 741-763, 766-773, 777-787, 792-802, 809-823, or 849-864 of SEQ ID NO. 164.

41. An antigenic fragment of an S. pyogenes antigen according to claim 39, wherein the fragment comprises amino acids 1-48, 4-20, 22-46, 49-70, 80-89, 96-103, 105-119, 123-129, 153-160, 181-223, 227-233, 236-243, 248-255, 261-269, 274-279, 283-299, 305-313, 315-332, 339-344, 349-362, 365-373, 380-388, 391-397, or 402-407 of SEQ ID NO. 166.

42. An antigenic fragment of an S. pyogenes antigen according to claim 39, wherein the fragment comprises amino acids 1-414, 443-614, 997-1392, 6-12, 16-36, 50-56, 86-92, 115-125, 143-152, 163-172, 193-203, 235-244, 280-289, 302-315, 325-348, 370-379, 399-405, 411-417, 419-429, 441-449, 463-472, 482-490, 500-516, 536-543, 561-569, 587-594, 620-636, 647-653, 659-664, 677-685, 687-693, 713-719, 733-740, 746-754, 756-779, 792-799, 808-817, 822-828, 851-865, 902-908, 920-938, 946-952, 969-976, 988-1005, 1018-1027, 1045-1057, 1063-1069, 1071-1078, 1090-1099, 1101-1109, 1113-1127, 1130-1137, 1162-1174, 1211-1221, 1234-1242, 1261-1268, 1278-1284, 1312-1317, 1319-1326, 1345-1353, 1366-1378, 1382-1394, 1396-1413, 1415-1424, 1442-1457, 1467-1474, 1482-1490, 1492-1530, 1537-1549, 1559-1576, 1611-1616, or 1624-1641 of SEQ ID NO. 169.

43. An antigenic fragment of an S. pyogenes antigen according to claim 39, wherein the fragment comprises amino acids 195-289, 4-20, 34-41, 71-86, 100-110, 113-124, 133-143, 150-158, 160-166, 175-182, 191-197, 213-223, 233-239, 259-278, or 298-322 of SEQ ID NO. 174.

44. An antigenic fragment of an S. pyogenes antigen according to claim 39, wherein the fragment comprises amino acids 30-80, 89-105, 111-151, 4-38, 63-68, 100-114, 160-173, 183-192, 195-210, 212-219, 221-238, 240-256, 258-266, 274-290, 301-311, 313-319, 332-341, 357-363, 395-401, 405-410, 420-426, 435-450, 453-461, 468-475, 491-498, 510-518, 529-537, 545-552, 585-592, 602-611, 634-639, or 650-664 of SEQ ID NO. 192.

45. An antigenic fragment of an S. pyogenes antigen according to claim 39, wherein the fragment comprises amino acids 195-203, 7-29, 31-39, 47-54, 63-74, 81-94, 97-117, 122-127, 146-157, 168-192, 195-204, 216-240, or 251-259 of SEQ ID NO. 193.

46. An antigenic fragment of an S. pyogenes antigen according to claim 39, wherein the fragment comprises amino acids 247-260, 9-33, 41-48, 57-79, 97-103, 113-138, 146-157, 165-186, 195-201,209-215, 223-229, 237-247, 277-286, 290-297, or 328-342 of SEQ ID NO. 215.

47. An antigenic fragment of an S. pyogenes antigen according to claim 39, wherein the fragment comprises amino acids 298-312, 4-19, 26-37, 45-52, 58-66, 71-77, 84-92, 94-101, 107-118, 120-133, 156-168, 170-179, 208-216, 228-238, 253-273,280-296, 303-317, or 326-334 of SEQ ID NO. 220.

48. An antigenic fragment of an S. pyogenes antigen according to claim 39, wherein the fragment comprises amino acids 141-157, 7-13, 27-35, 38-56, 85-108, 113-121, 123-160, 163-169, 172-183, 188-200, 206-211, 219-238, or 247-254 of SEQ ID NO. 221.

49. A pharmaceutical composition comprising at least one antigen according to claim 39, and optionally a pharmaceutically-acceptable carrier or excipient.

50. A pharmaceutical composition according to claim 49, further comprising an immunostimulatory substance.

51. A pharmaceutical composition according to claim 50, wherein the immunostimulatory substance is a polycationic polymer, an immunostimulatory deoxynucleotide (ODN),a peptide containing at least two Lys-Leu-Lys motifs, a neuroactive compound, alum, or a Freund's complete or incomplete adjuvant.

52. A pharmaceutical composition according to claim 51, wherein the polycationic polymer is a polycationic peptide.

53. A pharmaceutical composition according to claim 49 that is a vaccine.

54. An antibody or immunologically active fragment thereof that is immunologically specific for an antigen according to claim 39.

55. An antibody according to claim 54 that is a monoclonal antibody

56. An immunologically-active fragment of an antibody according to claim 54 that is an F(ab), F(ab)N, F(ab)₂ or Fᵥ fragment.

57. An antibody according to claim 54 that is a human antibody or a humanized antibody.

58. A method for preparing an antibody that is immunologically specific for an antigen according to claim 39, comprising the steps of inoculating an animal with a immunostimulatory amount of said antigen, isolating spleen cells from said animal after a time sufficient to raise an antibody in said animal, fusing the spleen cells with an immortalized cell line to produce antibody-producing fusion cells, and selecting fusion cells that produce an antibody that is immunologically specific for said antigen.

59. A method for diagnosing infection with Streptococcus in an animal comprising the step of identifying in a tissue or biological fluid of the animal a Streptococcus antigen comprising a polypeptide or fragment, wherein the antigen is identified by contacting the antigen with an antibody according to claims 54, 55, or 57.

60. A method according to claim 59 wherein the Streptococcus infection is caused by S. pyogenes.

61. A method for diagnosing infection with Streptococcus in an animal comprising the step of identifying in a tissue or biological fluid of the animal an antibody that is immunologically specific for a Streptococcus antigen, wherein the antibody is identified by contacting the tissue or biological fluid with an antigen according to claim 39.

62. A method according to claim 61 wherein the Streptococcus infection is caused by S. pyogenes.

63. A pharmaceutical composition comprising one or a plurality of antibodies according to claims 54, 55, or 57 and optionally a pharmaceutically-acceptable carrier or excipient.

64. A method for treating infection with Streptococcus in an animal comprising the step of administering to the animal a therapeutically-effective amount of a pharmaceutical composition according to claim 63.

65. A method according to claim 64 wherein the Streptococcus infection is caused by S. pyogenes.

66. A method for immunizing an animal against Streptococcus infection comprising the step of administering to the animal a vaccine according to claim 53.

67. A method according to claim 66 wherein the Streptococcus infection is caused by S. pyogenes.

68. A method for stimulating an immune response in an animal against Streptococcus, the method comprising the step of administering to the animal an immunogenic amount of a vaccine according to claim 53.

69. A method according to claim 68 wherein the immune response in an animal is against S. pyogenes.

70. The method of claim 66, further comprising the step of administering an immunostimulatory substance to the animal.

71. The method of claim 70, wherein the immunostimulatory substance is a polycationic polymer, an immunostimulatory deoxynucleotide (ODN), a peptide containing at least two Lys-Leu-Lys motifs, a neuroactive compound, alum, or a Freund's complete or incomplete adjuvant.

72. The method of claim 71, wherein the polycationic polymer is a polycationic peptide.

73. The method of claim 68, further comprising the step of administering an immunostimulatory substance to the animal.

74. The method of claim 73, wherein the immunostimulatory substance is a polycationic polymer, an immunostimulatory deoxynucleotide (ODN), a peptide containing at least two Lys-Leu-Lys motifs, a neuroactive compound, alum, or a Freund's complete or incomplete adjuvant.

75. The method of claim 74, wherein the polycationic polymer is a polycationic peptide.

76. A method according to claim 59, wherein the animal is a human.

77. A method according to claim 61, wherein the animal is a human.

78. A method according to claim 64, wherein the animal is a human.

79. A method according to claim 66, wherein the animal is a human.

80. A method according to claim 68, wherein the animal is a human.

The application's sequence listing, which the Patent Office published only in electronic form, follows.

SEQUENCE LISTING (300 sequences)

SEQ ID NO: 1 - DNA, 1287 bp, Streptococcus pyogenes
atgagaaaattattagcggctatgttaatgactttttttctgactcctttaccagtgattagtacagaaaaaaaacttatattttcaaaaaatgctgtttatcaattgaaacaagatgtcgttcaatcaacacaattctataatcaaataccctctaatccaaatctttatcaagaaacgtgtgcctataaagacagtgatttaactctaccagcaggaagattaggtgtaaatcaaccattacttattaaatcgcttgtgcttaacaaagaatctttaccggtttttgagttagctgatggtacctatgttgaggctaatcgacaattgatttatgacgatattgtacttaatcaagtagatatagatagctatttttggacacaaaagaaacttaggctttattcagccccttatgttttaggtacgcaaacaattccttcttcttttttatttgctcaaaaagttcatgccactcaaatggcacaaacaaaccatggaacttattatcttattgatgataagggctgggcatcacaagaagatctagttcaatttgataaccgcatgttaaaagtccaggaaatgctcttacaaaaatataataacccaaattattcaatttttgtaaagcaactcaacacacaaacaagtgctggtattaatgctgataaaaaaatgtatgctgcaagtatctcgaagttagcaccactttatattgttcaaaaacaattacaaaaaaagaaattagcagagaataaaactttgacttatactaaagatgttaatcatttttatggagactatgatccattgggaagtggtaaaattagtaaaatagctgataataaagattatcgtgttgaagacctactgaaagctgtagcacaacaatcggataatgtagcaactaatattttaggttattatctatgtcatcagtatgataaagctttccgctcagagataaaagctttatcaggtatcgattgggatatggagcagcgcttattaacttctcgttcagctgcaaatatgatggaagctatttatcatcaaaaaggccaaattatttcttacctttcaaataccgaatttgatcaacaacgtatcacaaaaaatattactgttccagttgcacataaaattggtgatgcttatgattataaacatgacgttgctattgtttacggtaatactccatttattttgtctatttttacaaataaatcaacctatgaagatattacggctattgcagatgacgtttatggtattttaaaatga

SEQ ID NO: 2 - DNA, 1197 bp, Streptococcus pyogenes
atgaaaaaaagaattttatcagcagttcttgtaagtggtgttaccctcggagcagctacaactgtaggagcggaggatttaagtactaagattgctaagcaagattctattatctcaaatctgactacagagcaaaaagctgcacagaatcaagtttcagcgttacaggctcaagtaagttcactacaatctgaacaagataaactgaccgcaagaaatacagaacttgaggcgctttcaaagcgatttgagcaagaaattaaggctctaacaagtcaaattgttgctcgtaatgaaaaattaaaaaatcaagctcgtagtgcttataaaaacaatgaaacttctggttatattaatgcacttttgaattctaaatcaatttctgatgttgtaaaccgtttagtagcaattaatagagctgtctctgctaacgctaaattgttagaacaacaaaaagctgataaagtttcccttgaagaaaagcaagctgctaaccaaacagctattaataccattgccgctaatatggcaatggctgaagaaaaccaaaatacattacgtactcaacaagctaatttggtagctgcaactgcaaatttagctctccaattagcatctgctactgaagataaagctaatttggtagctcaaaaagaagctgcagaaaaagctgctgctgaagccttagcacaagaacaggctgctaaagttaaggcacaagaacaggctgcacaacaagcagcatctgttgaagcagcaaaatctgctattactccagcaccacaagctactccggcagcgcaaagtagtaatgctattgaaccagctgcactcacggctccggcagctccttctgcaggaccacaaacatcatatgattcttctaatacttatccagttggacaatgcacatggggagctaaatctttagctccttgggcaggaaataattggggaaatggtggtcaatgggcttatagtgctcaagcagctggttatcgtactggttcaacgccgatggtaggtgcgattgccgtttggaacgatggtggttatggacatgtcgccgttgtagttgaggttcaaagtgcctcaagtattcgtgtgatggagtctaactacagtggtagacagtacattgctgaccaccgtggctggtttaatccaacaggtgttacatttatttatccacactaa

SEQ ID NO: 3 - DNA, 3774 bp, Streptococcus pyogenes
atgtcctcctattttccagtcgctcccttgtcggacttggtatcttatatgaataaacgtatttttgttgagaaaaaggctgactttggtattaaatcggctagtcttgtgaaagagttgacgcataatctacaactgacctctttgaaggctttgcgtattgtgcaggtctatgatgtcttcaatttggctgaggatttgctggcgcgtgctgagaagcatattttctctgagcaggtgacagactgtcttttgacggaaactgaaatcactgcggagcttgataaggttgccttctttgccattgaggcgcttcctggtcaatttgaccaacgtgctgctagttcgcaagaagctttgctattatttggaagtgacagtcaggttaaggtcaatacagcccagctatacttggtcaataaggatattacagaagcagagcttgaagccgttaagaactatcttttgaaccctgttgattcgcgtttcaaggacattactttgccgcttgaagagcaggctttctctgtatctgataagacgatccctaatcttgatttctttgaaacttatcaagctgacgattttgcgacttataaggcagagcagggcttggctatggaggtcgatgaccttctcttcatccaaaattatttcaaatcaatcggatgtgtgccaactgagactgagttgaaagttttggatacttactggtcagaccactgccgtcacacaacctttgaaactgaattgaagaacattgatttttcagcttctaaattccaaaaacaattgcagacaacttatgacaaatatatcgccatgcgtgatgagcttggtcgttctgaaaagccacaaacacttatggatatggcgactatttttggtcgttatgagcgtgccaacggtcgtctggacgatatggaagtctcagatgaaatcaatgcctgctcagttgagattgaagtagatgttgatggtgtgaaagagccttggctcctcatgtttaagaacgagactcacaatcacccaacagaaattgagccattcggtggagcggcgacttgtatcggtggtgctattcgtgacccattgtcaggacgttcatacgtttatcaggctatgcgtatttcaggcgcaggcgatatcacgactccgattgcggaaacacgtgctggtaaattgccacaacaagttatttctaaaactgcggcgcacggctattcttcatatggtaaccaaattgggcttgcgacaacttatgtgcgcgagtacttccaccctggcttcgtagccaaacgtatggagcttggagctgtggttggtgctgcacctaaggaaaatgtggttcgtgaaaaaccagaagcaggcgatgtggtcatcttgctcggtggtaaaacaggtcgtgatggtgtcggtggtgcgacaggttcatctaaggttcaaacggttgaatctgtggaaacagctggcgcagaggtacaaaaagggaatgccattgaagaacgtaagattcaacgtcttttccgtgatggcaatgtcactcgtcttattaagaaatcaaatgacttcggtgcaggtggtgtctgtgttgccatcggtgaattggctgacggtcttgaaatcgatttggacaaggtgcctcttaaataccaaggtcttaatggtactgaaattgcaatctcagaatctcaagagcgtatgtcagtcgttgttcgtccaaatgatgtggatgccttcatcgcagcctgcaacaaggaaaatatcgatgcagtcgttgttgcgaccgttactgaaaaaccaaatcttgtcatgacttggaatggcgaaatcatcgttgatttggaacgccgtttccttgataccaatggtgtccgtgtcgttgttgatgctaaagtcgttgacaaggacttgacagttccagaagcacgcacaacatcagcagagacacttgaagcagatacgcttaaggtcttgtctgacctcaaccacgctagtcaaaaaggtcttcaaactatctttgactcatctgttggtcgttcaaccgttaaccacccaatcggtggtcgttaccaaatcacaccgacagaaagttctgttcaaaaattgccagttcaacatggtgtgacaacaactgcatctgttatggctcaaggttacaatccttatattgcagagtggtcaccttatcacggtgctgcctatgctgtcattgaagcgacagctcgcttggtagcaacgggtgctgactggtctcgtgcacgtttctcttaccaagagtactttgagcgtatggataaacaggcagagcgttttggtcagccagtatcagctcttcttggttctattgaggctcagattcaacttggtttgccatcaatcggcggtaaggactctatgtctggtactttcgaagacttgacagtaccaccaaccttggtagctttcggcgtgacaacagcggacagccgcaaggttctctctcctgagtttaaagcggctggcgaaaacatttactatatcccaggtcaagctatttcagaagatattgattttgaccttatcaaggataactttagccagtttgaagctattcaagctcaacataagattacagctgcctcagccgctaaatacggtggtgtcctagaaagtcttgctctcatgacttttggtaaccgtatcggtgcttctgttgaaattgcagagcttgacagcagcttgacagctcaactcggaggttttgtctttacatcagctgaggaaattgctgacgcggtgaaaatcggtcaaactcaggcagactttacagtcactgtcaatggaaatgaccttgctggcgctagccttctagcagccttcgaaggcaaattggaagaggtttacccaacagaatttgagcagacagatgttcttgaagaagttcctgctgtggtatcagatactgttatcaaggctaaggaaacaattgaaaaaccagtggtttacattccagtcttccctggtaccaactcagaatacgattcagctaaggcctttgaacaggttggagctagtgtcaacttggtaccatttgtaaccttgaatgaggttgctattgctgagtcagttgacactatggttgctaatattgctaaggcaaatatcatcttctttgctggaggtttctcagcagcggatgaaccagatgggtctgctaagtttatcgtcaatatcttgcttaacgagaaggtccgcgcagctattgacagcttcatcgaaaaaggtggccttatcatcggtatctgtaatggtttccaagcccttgttaaatcaggtcttcttccatacggaaacttcgaggaagctggtgagacaagtccaactctcttctataatgatgctaatcagcatgttgccaagatggttgagactcgtatcgcaaataccaactcaccttggttggcaggagttgaggtcggcgatattcatgccattccagtttcacatggtgaaggtaaacttgttgtcagcgcttctgaatttgcagagctaagagacaatggtcaaatctggagccaatatgtggactttgacggacaaccatctatggattctaaatacaatccaaacggctctgtcaatgccatcgaagggattaccagcaagaatggtcaaatcatcggtaagatgggacactcagaacgctgggaagacggactcttccaaaatatccctggtaacaaagaccaaatcctctttgcaagtgctgtaaaatactttacagggaagtaa

SEQ ID NO: 4 - DNA, 1125 bp, Streptococcus pyogenes
atgaaaaaatttcatcgttttttggtctcaggagtaatccttttaggttttaatggtctagtacctactatgccatctacacttatttcgcaacaggaaaatcttgttcatgcagctgttttaggcgataactatccgagtaagtggaaaaaaggcaatggaatcgattcgtggaacatgtatatccgccaatgcacttcttttgcagcttttcgtttaagctctgctaatggttttcagttacctaaaggctacggtaatgcctgcacgtggggacatatcgcgaaaaatcagggttatcctgtgaataagacaccaagcataggggctatcgcttggtttgataaaaacgcttatcagtcaaatgctgcttacggtcatgtagcatgggtagctgatatccgtggagacactgtcactatcgaagagtataattacaacgctggacaaggccctgaaagataccataagcgtcaaattccaaaatctcaggtaagtggttatatccattttaaagacttatcatctcagacaagtcattcctacccaagacaactaaaacacatttctcaagcttcatttgacccctctggaacttatcactttacaaccagattaccagtcaaaggacaaaccagtatcgatagccctgatcttgcttactatgaagcaggtcaatctgtttattacgataaagtcgtgactgctggaggttatacatggcttagctacctcagtttttctggaaaccgacgctatattcccattaaagagcccgcacagtctgtggttcaaaatgacaatacaaaaccttccattaaggtcggtgatactgttaccttccctggcgtttttcgtgtagatcagcttgttaataatttgatcgttaataaagaattagccggaggagacccaactccactaaactggattgatcccacaccattagatgaaacagataaccaaggaaaagttttaggagatcaaattctccgtgtgggtgaatattttatcgtcactggtagttataaagtattaaaaattgatcaaccaagtaatggtatttatgttcaaatcggatctcgtggaacatgggtaaatgctgataaagctaacaaattatag

SEQ ID NO: 5 - DNA, 327 bp, Streptococcus pyogenes
atgattaatcaatggaacaacttacgacacaagaagctaaaaggatttactcttctagaaatgttattggtgattcttgtcatcagtgttttgatgctattatttgtgcctaatttaagcaagcaaaaagacagggttacagaaacaggtaatgccgctgttgttaaattagtggagaatcaagcagaactatatgaattatctcaaggctcaaaaccaagtttgagccagttaaaggcagatggtagtatcactgagaaacaagaaaaagcttatcaagactattatgacaaacataaaaatgaaaaagcccgtcttagcaattaa

SEQ ID NO: 6 - DNA, 771 bp, Streptococcus pyogenes
atgaaaattggcattattggtgttggcaaaatggctagcgctatcatcaaaggccttaaacaaacaccccatgaacttatcatttcaggatcatctttagaacggtccaaggaaattgcggagcagttagcactgccttatgctatgtcccaccaagaccttattgaccaggttgatcttgttattttaggcatcaagcctcaactatttgaaacggtactcaaaccgcttcacttcaaacagcctattatatctatggcagcaggcatttcccttcaacgactagcaacattcgtaggacaagaccttccgctgctacgtatcatgccaaacatgaatgcacaaattctccaaagcagtaccgctttaacgggaaatgctttggtgtcccaggaattacaagcacgtgttcgagacttaacagatagctttggtagcacatttgatattagtgaaaaggattttgacacctttaccgctttagcagggtcaagtcctgcctatatttatctctttattgaggctttggctaaggctggcgtcaagaatggcatacctaaagcaaaggcgctggagattgttactcaaacagtattggctagcgccagcaatctcaagaccagttctcaaagtccgcacgatttcattgacgctatttgtagccccggtggcacaactattgctggtctgatggagttagaacgccttggcctcacagctactgtcagctctgccattgacaaaaccatcgataaagctaaaagcttgtaa

SEQ ID NO: 7 - DNA, 1068 bp, Streptococcus pyogenes
atgacagacttattctcaaaaatcaaagaagttaccgaactggatggcattgcgggctatgaacatagcgttcgtgactacctacgcaccaaaataaccccgctggttgaccgtgttgaaacagacgggcttggtggcatttttggtatcagagatagtaaagctgaaaaagccccccgtattttagtagctgcgcacatggacgaagtcggttttatggtcagtgatatcaaagttgacggaacgctacgcgtggttggtatcggtggttggaacccacttgttgtcagttcacaacggtttaccctttacacacgcactggccaagttattccccttatttcaggatcggtacctccccattttttacgtggggcaaatggctctgctagtctaccacatatcgaagatattgtgtttgatggtggctttacggataaggcagaagctgaaagatttggtattacaccgggtgatattattatccctcaatctgaaacgatcctaacagccaatcaaaaaaatattatttcaaaagcttgggacaatcgctatggcgttctcatgataacagaaatgcttgaagcgttaaaaggacaagaccttaacaacaccctaattgcaggtgctaacgttcaagaagaagttggtctgcgcggagcccacgtctcaaccaccaagttcgaccctgaactctttttcgcagtagattgttcgcctgctggtgatatttatggcaatcctggaacaatcggagatggtaccttgttgcgtttctacgacccaggccatgtcatgctcaaagatatgcgcgacttcttactgactactgctgaggaagctggtgtcaatttccaatactattgtggcaagggaggcacagatgcaggtgctgcacaccttcaaaatggtggtgtcccatcaacaaccatcggagtctgtgcacgctacattcactctcatcaaaccctctacgctatggatgatttcgtagaagcccaagccttcttacaagccattatcaaaaaactggatcgctcaaccgttgacttgattaaatgttactaa

SEQ ID NO: 8 - DNA, 357 bp, Streptococcus pyogenes
atggaagatatttctgatccagaagttattttagagtatggggtttaccctgctttcataaaaggctatacccaattgaaagctaacatcgaagaagcattattagaaatgtcaaatagcggtcaagcattagacatttaccaagcagttcaaaccctaaacgctgaaaacatgttattaaattattacgaaagcttgccattttatttaaaccgtcaaagcatactagctaatatgaccaaagcgttaaaagatgcgcatattagagaggctatggcacattacaaattaggagaatttgctcactatcaagatactatgcttgatatggtcgaaagaacaataaaaacattttag

SEQ ID NO: 9 - DNA, 1716 bp, Streptococcus pyogenes
atgtctaataaaaaaacatttaaaaaatacagtcgcgtcgctgggctactgacggcagctcttatcattggtaaccttgttactgctaatgctgaatcgaacaaacaaaacactgctagtacagaaaccacaacgacaaatgagcaaccaaagccagaaagtagtgagctaactactgaaaaagcaggtcagaaaacggatgatatgcttaactctaacgatatgattaagcttgctcccaaagaaatgccactagaatctgcagaaaaagaagaaaaaaagtcagaagacaaaaaaaagagcgaagaagatcacactgaagaaatcaatgacaagatttattcactaaattataatgagcttgaagtacttgctaaaaatggtgaaaccattgaaaattttgttcctaaagaaggcgttaagaaagctgataaatttattgtcattgaaagaaagaaaaaaaatatcaacactacaccagtcgatatttccattattgactctgtcactgataggacctatccagcagcccttcagctggctaataaaggttttaccgaaaacaaaccagacgcggtagtcaccaagcgaaacccacaaaaaatccatattgatttaccaggtatgggagacaaagcaacggttgaggtcaatgaccctacctatgccaatgtttcaacagctattgataatcttgttaaccaatggcatgataattattctggtggtaatacgcttcctgccagaacacaatatactgaatcaatggtatattctaagtcacagattgaagcagctctaaatgttaatagcaaaatcttagatggtactttaggcattgatttcaagtcgatttcaaaaggtgaaaagaaggtgatgattgcagcatacaagcaaattttttacaccgtatcagcaaaccttcctaataatcctgcggatgtgtttgataaatcggtgacctttaaagagttgcaacgaaaaggtgtcagcaatgaagctccgccactctttgtgagtaacgtagcctatggtcgaactgtttttgtcaaactagaaacaagttctaaaagtaatgatgttgaagcggcctttagtgcagctctaaaaggaacagatgttaaaactaatggaaaatattctgatatcttagaaaatagctcatttacagctgtcgttttaggaggagatgctgcagagcacaataaggtagtcacaaaagactttgatgttattagaaacgttatcaaagacaatgctaccttcagtagaaaaaacccagcttatcctatttcatacaccagtgttttccttaaaaataataaaattgcgggtgtcaataacagaactgaatacgttgaaacaacatctaccgagtacactagtggaaaaattaacctgtctcatcaaggcgcgtatgttgctcaatatgaaatcctttgggatgaaatcaattatgatgacaaaggaaaagaagtgattacaaaacgacgttgggacaacaactggtatagtaagacatcaccatttagcacagttatcccactaggagctaattcacgaaatatccgtatcatggctagagagtgcactggcttagcttgggaatggtggcgaaaagtgatcgacgaaagagatgtgaaactgtctaaagaaatcaatgtcaatatctcaggatcaaccttgagcccatatggttcgattacttataagtag

SEQ ID NO: 10 - DNA, 429 bp, Streptococcus pyogenes
atgaaacaacaatcttaccagcctctacgcttcgtctacctcttggtggctctatttgctgctctgttgcttatagcaagacctgttatggcagatgagggaacaaatagtgctgatgcggcgtattataaagggcaaagtgctggaaaaaaagcagggaaaaaagctggaaaagaagctacttggactgatttgaccccaactgtcccaactaatccagaaacacctagtgacatcggagagactactaataaacagctctataaagaagggtataaagatgggtacaaagagggttataatgaaggctggaaatctcagtatcccgttttgactccggtcaaggttatatgggatttgatctcttattggctacagcgattattccccaataatcagtcaagtaccgcagcacaaagcatgtcataa

SEQ ID NO: 11 - DNA, 327 bp, Streptococcus pyogenes
gtgaaaaacaaattatttttagttgcccttgcgaccgtaactgtcctagggccgtctttagcaacccctcatcaccagaccgtgcatgctagtgatgtaacattaactgagacatgtgataaaaacggaacagtatgttttggctacgaaaacgtagatggtgaagtatgtaaattaacagctgacggaaagggaaccatttgtgtgggttacgaaaatagagacataaaagagagtgaaacttctagcaccaaaaatgattgttctaattggttttggtgctttttaaattatctttggactacaataaaaagctgggtttcgtaa

SEQ ID NO: 12 - DNA, 1197 bp, Streptococcus pyogenes
atggaaacaattttagaagtcaaacatctcagtaaaatttttggcaaaaaacaaaaagcagctcttgagatggtaaagactggcaaaaataagagtgagatttttaagaaaacaggcgctactgtaggtgtctatgacgctagttttgaggtcaaaaaaggtgaaatctttgttattatggggctatcaggaagtgggaaatcaacccttgtccgcatgctaaatcgtttgattgaaccttcagcaggatctatcttgctggaaggtaaagacatctcaaccatgtcagcagatcagctgcgtgaggtgcgccgccatgacattaacatggttttccaaagctttgccctctttcctcataaaaccattttggaaaataccgaatttggtttggaattacgtggcgttcccaaagaagaacgccagcgattggcagaaaaagcccttgataattcaggcctattagattttaaagaccagtacccaaaccaactatctggtgggatgcagcagcgtgtcggcctagcccgtgcgctagctaatagccctaaaattctcttaatggacgaggcattctcagcgcttgatcctttgattcgtcgtgagatgcaagatgaattacttgatttgcaagacagcatgaaacaaaccatcatctttatcagtcatgacttgaatgaagccttgcggattggtgatcggattgctttgatgaaagacggacaaattatgcaaattggtactggtgaggaaatcttgactaacccagccaatgactttgtgcgtgaattcgttgaggatgtggaccgttctaaagtcttgacagcacaaaatatcatgatcaaaccgttaacaactactgttgaattagatggacctcaagttgccttgaaccgtatgcacaacgaagaggtgtctatgttgatggcgacgaatcgccgccgccaattagtcggtagtttgacggccgatgccgctatagaggcgcgcaaaaaagggttaccgctatcagaagtgattgatcgcgatgtgagaactgtctcaaaagatactattattacagatattttgcctcttatctatgattcatctgctccgattgcagtgacagatgataataatcgtctgttaggtgtcattattcgaggacgagtgattgaagccttggctaatatctcagacgaagaccttaactaa

SEQ ID NO: 13 - DNA, 1785 bp, Streptococcus pyogenes
atgaaaacagcacgttttttctggttttattttaaacgctatcgtttctcatttactgtcattgctgttgccgttatcttagcaacttatttacaagtaaaagctcctgtcttcttaggagagtccttgactgagttgggaaaaatcggtcaggcttattacgttgctaagatgagtggccagacacattttagccctgatttatcagcttttaatgccgtgatgtttaagcttttgatgacttatttctttactgttttagctaatctaatatatagtttcttacttacacgtgttgtctcacattcgactaaccgcatgcgcaagggcttatttggtaaattagaacgtttaaccgtcgccttttttgaccgccataaagatggggagattctttctcgtttcacgagtgatttggataatattcaaaactcgctgaaccaatccttgattcaagtggtgactaatattgccctttacatcggcctggtctggatgatgtttaggcaagatagccgtttagctttgttaaccatcgcatcaaccccagttgctctcatttttttagtgattaacatccgtttggcaagaaaatacaccaatatccaacagcaagaagtcagtgctttaaatgcttttatggatgaaaccatttcaggacaaaaggctattattgtacaaggtgtccaagaagatacgatgacagcctttttaaagcataatgaaagggttcgacaagccaccttcaaacgccgtctgttctcaggacaattatttccagtcatgaatggaatgagccttattaacacggctatcgtgatttttgtcggttcaacaattgtcctcagtgacaaatctatgccagcagcggcagcgcttggtttagtggttacttttgtacaatattcccagcaatattaccaacccatgatgcaaatcgcgtctagttggggagaattgcagctggcctttaccggtgctcaccgtattcaagaaatgtttgatgaaaccgaagaagttcgtccacaaaatgcaccagcgttcaccagcttaaaagaagcagtggcgattaaccacgtcgattttgggtatcttcctgggcaaaaagttttatcagatgtgtcaatcgttgcacccaagggcaaaatgattgccgtggttggaccgacaggttctggaaagaccactattatgaacttgattaaccgtttctacgatgtggatgcaggttcgattacctttgatggccgtgatattcgtgactacgatttggatagtcttcgtcaaaaggtagggattgtgttgcaagagtcagttcttttttcaggaaccattacggataatattcgttttggtgatcagaccattagtcaagacatggttgaaactgctgcgcgtgcgacccatattcatgactttatcatgtccttaccaaaagggtacaatacctatgtctcagatgatgacaatgtcttttcaacaggtcaaaagcagttgatttctattgctaggacgctactgactgaccctgaagtgttgattttggatgaggccacttcaaatgttgatacggttaccgaaagtaaaattcaacgggccatggaagctatcgtggcaggtcgaactagctttgtcattgctcaccgcctcaaaaccattttaaatgccgatcacattattgtgttgaaagatggcaaggtcattgagcaaggaaatcatcatgagctattgcatcaaaaaggcttttatgccgaattgtatcacaatcaatttgtctttgaatag

SEQ ID NO: 14 - DNA, 2622 bp, Streptococcus pyogenes
atggacttagaacaaacgaagccaaaccaagttaagcagaaaattgctttaacctcaacaattgctttattgagtgccagtgtaggcgtatctcaccaagtcaaagcagatgatagagcctcaggagaaacgaaggcgagtaatactcacgacgatagtttaccaaaaccagaaacaattcaagaggcaaaggcaactattgatgcagttgaaaaaactctcagtcaacaaaaagcagaactgacagagcttgctaccgctctgacaaaaactactgctgaaatcaaccacttaaaagagcagcaagataatgaacaaaaagctttaacctctgcacaagaaatttacactaatactcttgcaagtagtgaggagacgctattagcccaaggagccgaacatcaaagagagttaacagctactgaaacagagcttcataatgctcaagcagatcaacattcaaaagagactgcattgtcagaacaaaaagctagcatttcagcagaaactactcgagctcaagatttagtggaacaagtcaaaacgtctgaacaaaatattgctaagctcaatgctatgattagcaatcctgatgctatcactaaagcagctcaaacggctaatgataatacaaaagcattaagctcagaattggagaaggctaaagctgacttagaaaatcaaaaagctaaagttaaaaagcaattgactgaagagttggcagctcagaaagctgctctagcagaaaaagaggcagaacttagtcgtcttaaatcctcagctccgtctactcaagatagcattgtgggtaataataccatgaaagcaccgcaaggctatcctcttgaagaacttaaaaaattagaagctagtggttatattggatcagctagttacaataattattacaaagagcatgcagatcaaattattgccaaagctagtccaggtaatcaattaaatcaataccaagatattccagcagatcgtaatcgctttgttgatcccgataatttgacaccagaagtgcaaaatgagctagcgcagtttgcagctcacatgattaatagtgtaagaagacaattaggtctaccaccagttactgttacagcaggatcacaagaatttgcaagattacttagtaccagctataagaaaactcatggtaatacaagaccatcatttgtctacggacagccaggggtatcagggcattatggtgttgggcctcatgataaaactattattgaagactctgccggagcgtcagggctcattcgaaatgatgataacatgtacgagaatatcggtgcttttaacgatgtgcatactgtgaatggtattaaacgtggtatttatgacagtatcaagtatatgctctttacagatcatttacacggaaatacatacggccatgctattaactttttacgtgtagataaacataaccctaatgcgcctgtttaccttggattttcaaccagcaatgtaggatctttgaatgaacactttgtaatgtttccagagtctaacattgctaaccatcaacgctttaataagacccctataaaagccgttggaagtacaaaagattatgcccaaagagtaggcactgtatctgatactattgcagcgatcaaaggaaaagtaagctcattagaaaatcgtttgtcggctattcatcaagaagctgatattatggcagcccaagctaaagtaagtcaacttcaaggtaaattagcaagcacacttaagcagtcagacagcttaaatctccaagtgagacaattaaatgatactaaaggttctttgagaacagaattactagcagctaaagcaaaacaagcacaactcgaagctactcgtgatcaatcattagctaagctagcatcgttgaaagccgcactgcaccagacagaagccttagcagagcaagccgcagccagagtgacagcactggtggctaaaaaagctcatttgcaatatctaagggactttaaattgaatcctaaccgccttcaagtgatacgtgagcgcattgataatactaagcaagatttggctaaaactacctcatctttgttaaatgcacaagaagctttagcagccttacaagctaaacaaagcagtctagaagctactattgctaccacagaacaccagttgactttgcttaaaaccttagctaacgaaaaggaatatcgccacttagacgaagatatagctactgtgcctgatttgcaagtagctccacctcttacgggcgtaaaaccgctatcatatagtaagatagatactactccgcttgttcaagaaatggttaaagaaacgaaacaactattagaagcttcagcaagattagctgctgaaaatacaagtcttgtagcagaagcgcttgttggccaaacctctgaaatggtagcaagtaatgccattgtgtctaaaatcacatcttcgattactcagccctcatctaagacatcttatggctcaggatcttctacaacgagcaatctcatttctgatgttgatgaaagtactcaaagagctcttaaagcaggagtcgtcatgttggcagctgtcggcctcacaggatttaggttccgtaaggaatctaagtga

SEQ ID NO: 15 - DNA, 1263 bp, Streptococcus pyogenes
atgacaaaagaaaaactagtggctttttcgcaagcccacgctgagcctgcttggctgcaagaacggcgtttagcggcattagaagccattccaaatttggaattaccaaccatcgaaagggttaaatttcaccgttggaatctaggagatggtaccttaacagaaaatgaaagtctagctagtgttccagattttatagctattggagataacccaaagcttgttcaggtaggcacgcaaacagtcttagaacagttaccaatggcgttaattgacaagggagttgttttcagtgatttttatacggcgcttgaggaaatcccagaagtaattgaagctcattttggtcaggcattagcttttgatgaagacaaactagctgcctaccacactgcttattttaatagcgcagccgtgctctacgttcctgatcacttggaaatcacaactcctattgaagctattttcttacaagatagtgacagtgacgttccttttaacaagcatgttctagtgattgcaggaaaagaaagtaagttcacctatttagagcgttttgaatctattggcaatgccactcaaaagatcagcgctaatatcagtgtagaagtgattgctcaagcaggcagccagattaaattctcggctatcgaccgcttaggtccttcagtgacaacctatattagccgtcgaggacgtttagagaaggatgccaacattgattgggccttagctgtgatgaatgaaggcaatgtcattgctgattttgacagtgatttgattggtcagggctcacaagctgatttgaaagttgttgcagcctcaagtggtcgtcaggtacaaggtattgacacgcgcgtgaccaactatggtcaacgtacggtcggtcatattttacagcatggtgtgattttggaacgtggcaccttaacgtttaacgggattggtcatattctaaaagacgctaagggagctgatgctcaacaagaaagccgtgttttgatgctttctgaccaagcaagagccgatgccaatccaatcctcttaattgatgaaaatgaagtaacagcaggtcatgcagcttctatcggtcaggttgaccctgaagatatgtattacttgatgagtcgaggactggatcaagaaacagcagaacgattggttattagaggattcctaggagcggttatcgctgaaattcctattccatcagtccgccaagagattattaaggttttagatgagaaattgcttaatcgttaa

SEQ ID NO: 16 - DNA, 1233 bp, Streptococcus pyogenes
atgatcaaacgattaatttccctagtggtcatcgccttattttttgcagcaagcactgttagcggtgaagagtattcggtaactgctaagcatgcgattgccgttgaccttgaaagtggcaaagttttatacgaaaaagatgctaaagaagttgtcccagtcgcctcagtcagtaagctcttgacaacctatctggtttacaaagaagtttctaagggcaagctaaattgggatagtcctgtaactatttctaactacccttatgaactcactacaaactatactattagtaacgttcctcttgataagagaaaatataccgttaaagaacttttaagtgcgttagttgttaataacgccaatagccccgctattgctttagctgaaaaaataggcggaaccgaacccaaatttgttgacaaaatgaaaaaacaattaagacaatggggcatttccgatgcaaaggtcgtcaattcaactggcttaactaaccattttttaggagctaatacttatcctaatacagaaccagatgatgaaaattgtttttgcgccactgatttagctattattgccaggcatctcttattagaatttccagaagtactgaaattatctagcaaatcctccactatttttgctggacaaaccatttacagttataattacatgcttaaaggcatgccttgttatcgagaaggcgtggatggtctttttgttggttattctaaaaaagccggtgcttcttttgtagctactagtgtcgaaaatcaaatgagggttattacagtagttttaaatgctgatcaaagccacgaggatgatttagctatatttaaaacaaccaatcaattgttgcagtaccttttaattaattttcaaaaagtccagttaattgaaaataataaaccagtaaaaacgttatatgtcttagacagtcctgaaaaaactgtcaaacttgtagcccaaaatagtttattttttatcaaaccaatacatacaaagaccaaaaataccgtccatattactaagaaatcatccacaatgatcgcacctctatcaaagggacaagtcttaggtagagcaacccttcaagataaacatcttattggacaaggttatctggatactcctccttctatcaatcttatccttcaaaaaaacatttctaaaagtttctttttaaaggtctggtggaaccgttttgtgaggtatgtcaatacctctttatag

SEQ ID NO: 17 - DNA, 927 bp, Streptococcus pyogenes
atggaatcgattgataaatctaaatttcgatttgttgagcgcgatagtgaagcctccgaagtgattgatacccctgcttattcttactggaaatcagtgtttcgtcagtttttttctaaaaaatctacagtctttatgctcgtaattttagtgacagtcttgatgatgagctttatttatccaatgtttgccaactacgactttaatgacgttagtaatatcaatgacttttcaaagcgttatatttggccaaatgcagagtactggtttggaaccgacaaaaatgggcaatctctgtttgatggtgtttggtatggggcacgtaattctattttaatctcagttatagcgacactaattaatatcaccattggggtagtgttaggagccatatggggagtttctaaagcatttgataaagttatgattgaaatttataacattatctcaaatatcccttctatgcttattatcattgttttgacctattcattaggtgcaggattttggaatttgattctagctttctgtatcactggatggattggtgtcgcctactccatccgtgttcaaatcttgcgttaccgtgatttagaatacaaccttgctagtcaaactttgggaacaccaatgtacaagattgctgttaagaacctcctgcctcaattggtttcagttatcatgactatgttgtcacaaatgctaccagtttatgtatcttctgaggccttcttatccttctttgggattggtttaccaaccaccactccaagtttaggacgttttattgctaattattcaagcaacttaacaacaaatgcctacctcttttggattcccttagtaacattgattttagtatcgttaccactatacattgtcggacaaaacttggctgatgccagtgacccacgttcacatagatag

SEQ ID NO: 18 - DNA, 1575 bp, Streptococcus pyogenes
ttggctttgaccgattttaaggataaagaccaacaagatcagcagcgaagctttaaagagcagattcttgctgagttggaaaaagcaaatcaaatcagaaaagaaaaagaggaagaactttttcaaaaagagttggaagctaaagaagcagctaggagaacggcccagctatatgctgaatataaaagacaagatgcttttcaaaaagagtctatagcacataacaataagacagctaaacactttcaagctataaaaggtgcggtaatgacttcagaagcgcttaaaccgactttactttctgaaaaagaaaactcatctttaaaaacgacaaataagagagtcgtgcaggcaaatgagcttcaagagactgcctctaaagaatctcaagtaccgttaactattgagaaaggtcattcagtgagacgaaaattaagcaaacgccaacagactgagcgagctgctaaaaagatttcaaccgttttgattagttctattattataacccttttggctgttactctagcaggagcaggctatgtttatagtgctttaaatcctgttgataaaaatagtgatgcctttgttcaagttgagattccatctgggtcaggcaataaattgattggtcaaattcttcaaaaaaaaggtttaatcaagaatagcactgtttttagtttttatacaaaatttaaaaactttacaaattttcagagcgggtattataatctgcaaaaaagtatgagtctagaagaaattgctagtgctttacaagaaggtggtacagcagaacctaccaagccatctcttgggaagatcttgattccagaaggatacacgattaaacaaatagctaaagctgttgagcataatagcaagggaaagaccaaaaaagctaaaacaccttttaacgagaaggattttttggatttagtcacggatgaggcttttattcaagatatggtaaaaagatatccaaaattattagcaactatcccaactaaagaaaaagctatttaccgtttggaaggttaccttttcccagcaacctataactattacaaagaaactaccatgagagaacttgtagaggacatgctggcagctatggatgctactttggtaccctattatgataaaattgctgctagtggtaagacagtcaacgaggtattgaccttggcctctttggttgaaaaagaaggttcaacagacgatgacagacgtcaaattgcaagtgtcttttataaccgccttaatagcggaatggcactacaatctaatatagctattttgtatgcgatggggaaacttggtgagaaaacaaccttggctgaggatgctactattgacaccaccattaattctccttataatatttataccaatacaggtctgatgcctggtccagttgctagctcgggggtttctgcaattgaagcaaccctaaatccagcctcaacggattatttatactttgtggccaatgtccatactggtgaagtttactatgcaaaaacatttgaagaacactctgcaaatgttgaaaaatatgtgaatagtcaaattcagtaa

SEQ ID NO: 19 - DNA, 4944 bp, Streptococcus pyogenes
gtggagaaaaagcaacgtttttcccttagaaaatacaaatcaggaacgttttcggtcttaataggaagcgttttcttggtgatgacaacaacagtagcagcagatgagctaagcacaatgagcgaaccaacaatcacgaatcacgctcaacaacaagcgcaacatctcaccaatacagagttgagctcagctgaatcaaaatctcaagacacatcacaaatcactctcaagacaaatcgtgaaaaagagcaatcacaagatctagtctctgagccaaccacaactgagctagctgacacagatgcagcatcaatggctaatacaggttctgatgcgactcaaaaaagcgcttctttaccgccagtcaatacagatgttcacgattgggtaaaaaccaaaggagcttgggacaagggatacaaaggacaaggcaaggttgtcgcagttattgacacagggatcgatccggcccatcaaagcatgcgcatcagtgatgtatcaactgctaaagtaaaatcaaaagaagacatgctagcacgccaaaaagccgccggtattaattatgggagttggataaatgataaagttgtttttgcacataattatgtggaaaatagcgataatatcaaagaaaatcaattcgaggattttgatgaggactgggaaaactttgagtttgatgcagaggcagagccaaaagccatcaaaaaacacaagatctatcgtccccaatcaacccaggcaccgaaagaaactgttatcaaaacagaagaaacagatggttcacatgatattgactggacacaaacagacgatgacaccaaatacgagtcacacggtatgcatgtgacaggtattgtagccggtaatagcaaagaagccgctgctactggagaacgctttttaggaattgcaccagaggcccaagtcatgttcatgcgtgtttttgccaacgacatcatgggatcagctgaatcactctttatcaaagctatcgaagatgccgtggctttaggagcagatgtgatcaacctgagtcttggaaccgctaatggggcacagcttagtggcagcaagcctctaatggaagcaattgaaaaagctaaaaaagccggtgtatcagttgttgtagcagcaggaaatgagcgcgtctatggatctgaccatgatgatccattggcgacaaatccagactatggtttggtcggttctccctcaacaggtcgaacaccaacatcagtggcagctataaacagtaagtgggtgattcaacgtctaatgacggtcaaagaattagaaaaccgtgccgatttaaaccatggtaaagccatctattcagagtctgtcgactttaaagacataaaagatagcctaggttatgataaatcgcatcaatttgcttatgtcaaagagtcaactgatgcgggttataacgcacaagacgttaaaggtaaaattgctttaattgaacgtgatcccaataaaacctatgacgaaatgattgctttggctaagaaacatggagctctgggagtacttatttttaataacaagcctggtcaatcaaaccgctcaatgcgtctaacagctaatgggatggggataccatctgctttcatatcgcacgaatttggtaaggccatgtcccaattaaatggcaatggtacaggaagtttagagtttgacagtgtggtctcaaaagcaccgagtcaaaaaggcaatgaaatgaatcatttttcaaattggggcctaacttctgatggctatttaaaacctgacattactgcaccaggtggcgatatctattctacctataacgataaccactatggtagccaaacaggaacaagtatggcctctcctcagattgctggcgccagccttttggtcaaacaatacctagaaaagactcagccaaacttgccaaaagaaaaaattgctgatatcgttaagaacctattgatgagcaatgctcaaattcatgttaatccagagacaaaaacgaccacctcaccgcgtcagcaaggggcaggattacttaatattgacggagctgtcactagcggcctttatgtgacaggaaaagacaactatggcagtatatcattaggcaacatcacagatacgatgacgtttgatgtgactgttcacaacctaagcaataaagacaaaacattacgttatgacacagaattgctaacagatcatgtagacccacaaaagggccgcttcactttgacttctcactccttaaaaacgtaccaaggaggagaagttacagtcccagccaatggaaaagtgactgtaagggttaccatggatgtctcacagttcacaaaagagctaacaaaacagatgccaaatggttactatctagaaggttttgtccgctttagagatagtcaagatgaccaactaaatagagtaaacattccttttgttggttttaaagggcaatttgaaaacttagcagttgcagaagagtccatttacagattaaaatctcaaggcaaaactggtttttactttgatgaatcaggtccaaaagacgatatctatgtcggtaaacactttacaggacttgtcactcttggttcagagaccaatgtgtcaaccaaaacgatttctgacaatggtctacacacacttggcacctttaaaaatgcagatggcaaatttatcttagaaaaaaatgcccaaggaaaccctgtcttagccatttctccaaatggtgacaacaaccaagattttgcagccttcaaaggtgttttcttgagaaaatatcaaggcttaaaagcaagtgtctaccatgctagtgacaaggaacacaaaaatccactgtgggtcagcccagaaagctttaaaggagataaaaactttaatagtgacattagatttgcaaaatcaacgaccctgttaggcacagcattttctggaaaatcgttaacaggagctgaattaccagatgggcattatcattatgtggtgtcttattacccagatgtggtcggtgccaaacgtcaagaaatgacatttgacatgattttagaccgacaaaaaccggtactatcacaagcaacatttgatcctgaaacaaaccgattcaaaccagaacccctaaaagaccgtggattagctggtgttcgcaaagacagtgtcttttatctagaaagaaaagacaacaagccttatacagttacgataaacgatagctacaaatatgtctcagtagaagacaataaaacatttgtggagcgacaagctgatggcagctttatcttgccgcttgataaagcaaaattaggggatttctattacatggtcgaggattttgcagggaacgtggccatcgctaagttaggagatcacttaccacaaacattaggtaaaacaccaattaaacttaagcttacagacggtaattatcagaccaaagaaacgcttaaagataatcttgaaatgacacagtctgacacaggtctagtcacaaatcaagcccagctagcagtggtgcaccgcaatcagccgcaaagccagctaacaaagatgaatcaggatttctttatctcaccaaacgaagatgggaataaagactttgtggcctttaaaggcttgaaaaataacgtgtataatgacttaacggttaacgtatacgctaaagatgaccaccaaaaacaaacccctatctggtctagtcaagcaggcgctagtgtatccgctattgaaagtacagcctggtatggcataacagcccgaggaagcaaggtgatgccaggtgattatcagtatgttgtgacctatcgtgacgaacatggtaaagaacatcaaaagcagtacaccatatctgtgaatgacaaaaaaccaatgatcactcagggacgttttgataccattaatggcgttgaccactttactcctgacaagacaaaagcccttgactcatcaggcattgtccgcgaagaagtcttttacttggccaagaaaaatggccgtaaatttgatgtgacagaaggtaaagatggtatcacagttagtgacaataaggtgtatatccctaaaaatccagatggttcttacaccatttcaaaaagagatggtgtcacactgtcagattattactaccttgtcgaagatagagctggtaatgtgtcttttgctaccttgcgtgacctaaaagcggtcggaaaagacaaagcagtagtcaattttggattagacttaccggtccctgaagacaaacaaatagtgaactttacctaccttgtgcgggatgcagatggtaaaccgattgaaaacctagagtattataataactcaggtaacagtcttatcttgccatacggcaaatacacggtcgaattgttgacctatgacaccaatgcagccaaactagagtcagataaaatcgtttcctttaccttgtcagctgataacaacttccaacaagttacctttaagataacgatgttagcaacttctcaaataactgcccactttgatcatcttttgccagaaggcagtcgcgttagccttaaaacagctcaagatcagctaatcccgcttgaacagtccttgtatgtgcctaaagcttatggcaaaaccgttcaagaaggcacttacgaagttgttgtcagcctgcctaaaggctaccgtatcgaaggcaacacaaaggtgaataccctaccaaatgaagtgcacgaactatcattacgccttgtcaaagtaggagatgcctcagattcaactggtgatcataaggttatgtcaaaaaataattcacaggctttgacagcctctgccacaccaaccaagtcaacgacctcagcaacagcaaaagccctaccatcaacgggtgaaaaaatgggtctcaagttgcgcatagtaggtcttgtgttactcggacttacttgcgtctttagccgaaaaaaatcaaccaaagattga

SEQ ID NO: 20 - DNA, 555 bp, Streptococcus pyogenes
atgaaatggagtggttttatgaaaacaaaatcaaaacgctttttaaacctagcaaccctttgcttggccctactaggaacaactttgctaatggcacatcccgtacaggcggaggtgatatcaaaaagagactatatgactcgcttcgggttaggcgatttagaagatgattcagctaactatccttcaaatttagaagctagatataaaggatatttagagggatatgaaaaaggcttaaaaggagatgatatacccgaacggcccaagattcaggttcctgaggatgttcagccatctgaccatggcgactatagagatggttatgaggaaggatttggagaaggacaacataaacgtgatccattagaaacagaagcagaagatgattctcaaggaggacgtcaagaaggacgtcaaggacatcaagaaggagcagattctagtgatttgaacgttgaagaaagcgacggtttgtctgttattgatgaagtagttggagtaatttatcaagcatttagtactatttggacatacttaagcggtttgttctaa

SEQ ID NO: 21 - DNA, 633 bp, Streptococcus pyogenes
atgaaaaagacattaactttgctactggcactctttgccatcggggtaactagtagcgtcagagcggaggatgaacaaagtagtacacaaaagccagtaaaatttgatttggatggacctcaacaaaaaattaaagattatagtggcaacacaatcactctagaagacttatatgttggtagtaaagtagtaaaaatatatatccctcaaggatggtgggtatatctttacagacaatgtgatcataacagtaaagaacgaggaattttagctagtcctattctcgaaaaaaatataacaaaaacagatccttatcgtcaatattatacaggagtaccttatattcttaacttaggagaagatcctttgaagaaaggagaaaaattaactttctcatttaaaggagaagacggattttatgtcggtagctatatctatagagactctgatactataaaaaaagaaaaagaagctgaagaagcacttcaaaaaaaggaagaggaaaagcaacaaaaacagctagaagaaagcatgctaaagcagataagagaagaagaccataaaccttggcatcagcggttaagtgagagcatccaagatcagtggtggaactttaagggactgtttcagtga

SEQ ID NO: 22 - DNA, 615 bp, Streptococcus pyogenes
atgaaaaaaacattaaccttgctactggcactctttgccatcggggtaactagtagcgtcagagcggaggatgaacagaataagtttatacttgatggattacaggaaaaagtaaaagaagttagtgtatcagatttttctgttggagaatctaaaatcaaagtctggcttcctcaagcttggtcggtcaaaatttctagagaacattcaccaaaatcaagcatttctaattctggagaacaaaaacctttaagcaatagctcagagaataaagaaggtcaattttctaaaagattaccttatggtacccaacatactattaaattatcatcccaacttacaaaaggtgagagagtcactttgacattcagagatgaagatttttggggagcaggttactgcttctatagagattcactatccataaaagaagacaaacaatacgaagaagaaattaagaaaattgaggatgacctagagagacaagatcttgaaaatgatgcactagagatgtttaaaaaacaaaccgaaagagaggctaataaaccttggcatcagcggttaagcgaaaacatccaagatcagtggtggaactttaagggactgtttcagtga

SEQ ID NO: 23 - DNA, 1170 bp, Streptococcus pyogenes
atgattattactaaaaagagcttatttgtgacaagtgtcgctttgtcgttagtacctttggcgacagcgcaggcacaagagtggacaccacgatcggttacagaaatcaagtctgaactcgtcctagttgataatgtttttacttatactgtaaaatacggtgacactttaagcacaattgctgaagcaatggggattgatgtgcatgtcttaggagatattaatcatattgctaatattgacctaatttttccagacacgatcctaacagcaaactacaatcaacacggtcaggcaacgaatttgacggttcaagcacctgcttctagtccagctagcgttagtcatgtacctagcagtgagccattaccccaagcatctgccacctctcaaccgactgttcctatggcaccacctgcgacaccatctgatgtcccaacgacaccattcgcatctgcaaagccagatagttctgtgacagcgtcatctgagctcacatcgtcaacgaatgatgtttcgactgagttgtctagcgaatcacaaaagcagccagaagtaccacaagaagcagttccaactcctaaagcagctgaaacgactgaagtcgaacctaagacagacatctcagaagccccaacttcagctaataggcctgtacctaacgagagtgcttcagaagaagtttcttctgcggccccagcacaagccccagcagaaaaagaagaaacctctgcgccagcagcacaaaaagctgtagctgacaccacaagtgttgcaacctcaaatggcctttcttacgctccaaaccatgcctacaatccaatgaatgcagggcttcaaccacaaacagcagccttcaaagaagaagtggcttctgcctttggtattacgtcatttagtggttaccgtccaggtgatccaggagatcatggtaaaggtttggccattgattttatggtgcctgaaaattctgctcttggtgatcaagttgctcaatatgccattgaccatatggcagagcgtggtatttcatacgttatttggaaacagcgattctatgcgccatttgcaagtatttacggaccagcctacacatggaaccccatgccagatcgcggcagtattacagaaaaccattatgatcatgttcatgtctcctttaatgcttaa

SEQ ID NO: 24 - DNA, 996 bp, Streptococcus pyogenes
ttgcggcagattcagtccattcgtctgatagacgttttggagttggcttttggagttggctataaggaagaaacaacctctcagttttcttcggatcagccctcccaagtggttttgtatcgaggtgaggctaacacggttaggtttgcctataccaatcagatgtctctgatgaaagatattcgcattgctttggatggttctgataagtctttgaccgctcagattgttcctggtatgggtcatgtttatgagggctttcaaacttctgctagagggatttttacgatgtcaggagttcctgaaagcactgttcccgttgctaaccctaatgtacaaaccaaatatataaggtatttcaaagtcattgatgatatgcataacacaatgtataaaggaactgtttttcttgttcaaccgcaagcttggaaatacaccatgaaatctgttgatcagttaccagtagatgacttgaaccatattggcgttgctggtattgaacgaatgacaactctcattaaaaatgcgggtgcccttttaaccacaggaggtagtggggctttcccagacaatattaaagtatctattaatccaaaggggaggcaggccacgattacttatggggacggctctacggatattattcctccagcagttttatggaaaaaaggctccgtaaaagagcctactgaagccgatcaatctgtcggaacaccgactcctggtattcctggtaaattcaaacgagaccagagccttaacgagcatgaagctatggtaaatgtcgaaccactgtctcatgtagtaaaagacaatataaaggtcatagatgaaaaatcaacagggcggtttgagccttttagacctaatgaagatgagaaggagaagcctgccagcgatgttaaggtaagaccagcagaagttggtagctggctagaaccagcgacagctcttcctagtgttgaaatgagcgctgaggacaggttaaaaagttag

SEQ ID NO: 25 - DNA, 999 bp, Streptococcus pyogenes
atgaaagtcttattgtatttagaagcagaaaattatctaagaaaatcaggaattggtcgagcgattaagcatcaggctaaagccttgtcacttgttggtcaacattttacgactaatccaagagaaacttatgatttggttcatctcaatacctatggtttaaaaagttggctgctgatgataaaagcacaaaaagctggtaagaaggttatcatgcatgggcattctacagaagaagattttagaaattcttttattttttcaaatctattatctccttggtttaaaaaatacctttgtcacttttacaataaggcagatgctatcattacccctaccctatattctaagtctttgattgagagttatggagtgaagtcacctatttttgcagtgtcaaatgggattgatttggagcagtacggagcagatcctaaaaaggaagcagcttttcgtcgctactttgacattaaagagggtgaaaaagtggttatgggagcaggattattttttctgaggaaaggaattgatgactttgtcaaagttgcccaagctatgccagatgttcgttttatctggtttggcgagaccaacaaatgggtcattcctgctcaagttcgccaaatggtcaatggtaaccacccgaaaaatcttattttcccaggatacattaaaggggatgtttatgaaggtgccatgactggtgcagatgcctttttctttccaagtcgtgaagaaacagaaggcattgttgtcttagaagccttggccagtcgccagcaccttgttttacgtgatataccagtttactacggatgggttgatcaaagtagtgcggaattagcaaccgatataccaggttttatagaagctctgaaaaaagtcttttctggtgccagcaacaaagttgaagctggttacaaggttgcccagagtcgtcgcctagaaacggttggccatgccttagtagatgtctataaaaaagtaatggagttataa

SEQ ID NO: 26 - DNA, 2133 bp, Streptococcus pyogenes
atggaaaataacaataatcacaacattgcagaggctttgtcagttagtctccatcaaattgaacaggtgcttgccctaacagcacaaggcaataccattccctttattgcacgttaccgtaaagaagtaacaggaaatctagatgaagtggtgattaagtccattattgatatggataagtctctcactaccctgaatgagcgcaaagcaaccattctcgctaaaattgaggaacagggaaaactgacagatcagttacgaacgagtattgaagcaaccgagaaactcgctgatttggaagagttgtacctgccttataaggaaaaacgccgtacaaaagcgacgattgcgcgtgaagcaggcttgttcccattagcacgtttgattttacaaaatgcgcaaaaccttgaaacagcagcagaaccctttgtcacagaaggatttgccagcccacaagaagctctagcaggagctgtggacatccttgtggaggccatgtcagaagatgctaaattacgctcttggacctacaatgagatttggcagtacagccgcttagtatcaacgcttaaagatgagcagttggatgagaaaaaggttttccaaatctattacgatttttctgaccaagtgtctaacatgcaaggatatcgtactttagcccttaaccgtggcgaaaagttaggcatcttaaaagtgtcttttgagcataacttggagaaaatgcaacgctttttcagtgtgcggttcaaagaaaccaacccttatattgaagaggtcatcaatcagaccatcaaaaagaaaattgttccagctatggaaagacgggttcgttcagaactcagtgatgccgcagaagatggggctatccacctcttttctgaaaatctccgtcatcttttgttagtgtctcctttaaaagggaaaatggttcttgggtttgaccctgcctttcgaacaggtgcaaaattggctatcgttgatcagactggaaaattgttgactactcaggttatttatcccgtagcaccagctagccaaacgaagattcaagcagctaaagaaacactgactcagctcattgagacttaccagattgatattattgccattggaaacggaacagccagtcgggaaagtgaagcctttgtagcagacgttttgaaagatttcccaaatacgtcctatgtcatcgttaacgaaagcggtgcttctgtttattcagcgtcagagttagcccgccatgagtttccagacctcacagtggagaagcgctctgctatttctattgctcgtcgcttgcaagacccactcgcagaattggttaaaattgatcctaaatctattggcgtcggtcagtaccagcacgatgtgagtcagaaaaagttgagtgagaatcttggttttgttgtggatactgtggttaaccaagtcggtgttaatgtgaacacggctagtccatctttattagcacatgtgtcaggtttgaacaaaacgatttcagaaaatattgtcaaataccgcgaagaaaatggagcactgacatcacgcgctgacatcaaaaaagtgccgcgtttaggagccaaggcgtttgagcaagcagcaggttttctcagaattccaggagccaaaaatattttagacaacacaggagttcaccccgagtcctacccagcagtcaaagaactctttaaggtacttggtattcaggacttggacgacgctgccaaggcaactttagcagcagttcaagttccccaaatggcagaaacattggctattgggcaggaaacccttaaagatatcattgctgatctccttaaaccgggtcgtgaccttcgtgatgactttgaagcaccaatcttacgtcaagatatccttgatttgaaagatttggaaattggccagaagcttgaaggaactgtgagaaacgtcgttgactttggtgcttttgtagacattggtgttcatgaagatgggcttattcacatttctgaaatgagcaaaacctttgtcaaccaccctagtcaagttgtttcagtgggtgacttggtaactgtttgggtctctaagattgacttggaccgccacaaggtcaatctcagcctattgccaccgcgtgacactcactaa

SEQ ID NO: 27 - DNA, 1302 bp, Streptococcus pyogenes
atgaatgaaaaagtatttcgtgaccctgttcacaactatatccacattgataatccattaatttatgaccttatcaataccaaagaattccaacgcttacgacgcatcaaacaagtccctacaacagctttcaccttccacggcgcagaacatagccgtttttctcactgcctaggtgtttacgaaattgcccgtcgggtgacagctatttttgaagagaaatacgctgatatctggaataaagatgaaagtctggtcactatgacggctgccctcttacatgacattggtcatggagcctattctcatacctttgaggttctttttcatacggatcacgaggcctttactcaggagataattaccaatcctgagacagaaatcaatgccattttggtgcgtcatgctcctgattttccagacaaagttgccagcgtgattaatcatacttatcctaacaagcaagttgtgcaactgatttccagccagattgactgcgaccgtatggattaccttttaagagattcttatttttctgctgccaattacggtcagtttgatttaatgcgcatcctacgtgtgattcgacctgttgaagatggcattgtctttgaacatagtggtatgcatgctgtcgaggactatattgtcagtcgttttcaaatgtacatgcaggtctattttcatcccgccagccgtgctgttgagctcatcttacaaaatctcctcaaaagagcccaacacttatatcctgagcaacaggcttatttccaaaaaacagctcctggactcatccccttctttgaaaagaaggctaatttagcagattatatagccctagatgacggagtcatgaatacttacttccaagtctggatggcaagcgaagaccatatcttatcagatttggccagtcgctttattaatcgaaaaattctgaagtctgttacctttgaccaagattcccaaggagagttagaacgcttgcgccaattggtcgaatcagttggctttgatccagattattacaccggtatccatatcaacttcgacctgccttatgatatttatcgaccagagctcgaaaatccaagaactcagattgaaatgatgcaaaaagacgggagccttgctgaattatctcagttatctcctattgtcaaagcattaacagggacaacctacggagaccgtcgcttttattttccaaaggaaatgttagagctcgatgacctctttgctcctagcaaggaaacttttatgagttatatttccaatgggcattttcactttagtcagtaa

SEQ ID NO: 28 - DNA, 783 bp, Streptococcus pyogenes
atggatatcaatttgttacaggcacttttaattggtctttggacagccttttgtttcagcggaatgttacttggcatctacaccaaccgttgtattattctgtcttttggtgtagggattatcttaggtgacttgccaactgcacttagcatgggagctatctccgaattagcttatatgggatttggagtgggtgccggtggtaccgttcctcctaatcctatcggccctggtatctttggtaccttgatggctattaccagtgctggtaaagtcaccccagaagcggcactagccttatcaacaccaatcgcagttgccatccaattccttcaaacattcgcctatacagcttttgctggcgctcccgaaaccgctaaaaaacaattgcaaaaaggcaatattagaggcttcaaattcgctgccaacggcactatctgggctttcgcttttatcggattaggccttggtttattaggtgccttgtcaatggatactctccttcacttggttgattatatcccacctgtcttgctcaatggattgactgtcgctggtaaaatgttacctgctatcggatttgccatgatcttatctgttatggccaagaaagaattgattccttttgtactaattggttatgtttgtgcagcctacctccaaattccaaccattggtatcgccattattggtatcattttcgccttgaatgaattttacaacaaacctaaacaagtcgatgcaacaactgtccaaggaggccaacaagatgactggatctaa

SEQ ID NO: 29 - DNA, 1212 bp, Streptococcus pyogenes
ttgacccctcgtagcggaaagaccacagctgggcattttcgttatgctaggtatctgattgagtcagaagatgaaaatcaccttgtgactgcttataatcaagaacaagcttatcgtttgtttatcgacggcgatggtacgggtttgatgcatatatttgacggtaactgtgaaataaaacacgacgagcgtggagatcacttgttaatcacgacaccaaaaggcaataagcgcgtttattataaaggcggcggtaaagttaacagtgttggtgctattacaggtatgtctttaggatcagtagtattctgcgagattaacttactgcacatggattttatccaggagtgttttaggcgtacttgggcggctaagctacgttatcatctagcagatttaaatcccccagcacctcaacatccagtaattaaagatgtctttgatgttcagaacacgaggtggactcattggaccatggatgataacccaatactaaccgcagagcgtaaacaaaacattatcaacagtcttaaaaaaaatccatatctatacaaacgagatgtacttggacagcgggtcatgcctcagggagttatttatggcctttttgacacggaaaaaaatgttttggatgctttgattggcgaaccagtagagatgtatttctgtgcagatggaggtcaatcagatgccacctctatgtcttgtaatatcgtaacaagagttagagataacggtaggataagcttcagacttaatcgtgtagctcactactaccacagcggagctgacactggccaagtaaaagctatgtcaacctacgctttagagttaaaagtttttatagactggtgcgttaaaaagtatcagatgcgctatacagaggtatttgtggatcctgcctgtaaatctttgagagaggagctgcataagttaggagtatttactctgggagctccgaacaattctaaagatgtatctagcaaagcaaaaggtattgaggtcggtatcgaacgcggccaaaacattatctcagatggcgctttttatcttgttaatcatagcgaagaagagtatgaccactaccactttttaaaagagatagggctgtacagtcgtgacgacaatggcaaacctattgataaagataaccatgccatggacgagtttagatacagcgtcaacgtgtttgtgcatcggtattacaactaa

SEQ ID NO: 30 - DNA, 1494 bp, Streptococcus pyogenes
atgaaaaagaagcctattaagttaaatgacgaacagcttcttttggaagctagtcagttatctgatatgtatcatcagctgactcttgatttatttgatcaagtgattgagaggataaaagccagaggctcagcgagcttagccgataatccttatctttggcaagctaataagttacatgacgttggactgcttaatgcagataacatcaagcttattgcaaagtattctggcattgcggaagctcaacttcgctatattatcaagaatgaaggatttaaaatttataaaaacacgtctgagcagctagaagaggctctaggtagagagtctggggtaaacagtactatccaagacgacctatctaactatgctagacaagctattgatgatgtgcataatttgactaacaccaccttgccatttagtgttataggagcttatcaagggataatccaagacgctgttgctggtgtggtgacaggcttaaaaacgcctgaccaagctatcaatcaaactgtgattaaatggtttaaaaaggggttttatggttttacagataaagctgggagaaagtggagagcagactcttatgctcgtaccgttatcaatactacgacttggcgagtctttaacgaagccaaagaagcccctgctagggagtttggcattgataccttctattactcaaaaaaagctacagctagagagatgtgtgcacctttgcaacatcaaattgtcactactggcgaagcgagagaagaaggagggataaaaatcttagctttatctgattacgggcatggtgagcctgatggatgcttgggaatcaactgcaagcacactaaaacgccgtttgtcgtcggtgtgaatagtaagccagaattgccagagcatctaaaaaatatcactcctgcacaagctaaagctaatgcgaatgcgcaagctaagcagagggcaatcgagagatcaatacgtaagagtaaagagctactgcacgttgcgaagcaattgggtgataaagagttgattaggcaatatcaatcggatgttagaagtaaacaagatgcactcaattatctgataaacaacaatgcctttttacatcgcaatcaagccagagaaaagcgttacaataatccttataccaaaactcaaagtgaagtcgaagttagaaaagaaaaagctaaattagataaacgtagggatgttgaaagtgctataataggagtagaaactagtgaagggataccgctaaaaataacaaagcatttagccgaaagggcggtgctgagaaatatagcacctattgatattgtcgattctataaaagaaccgttgaagatagctcctattaagtacgataaccttgatagaccttcccagaaatacattggtaagtgtgtctcgacagtaataaacccgatagacggaaatattgttacagttcatgctactagcacgagaatccgcaaaaaatatggaggaaattga

SEQ ID NO: 31 - DNA, 1887 bp, Streptococcus pyogenes
atgagcagagacccaacacttattttagacgagtcaaacctcgttattggtaaggatggacgtgtgcattacacatttaccacagaggacgacaacccaaaagtcagactagctagcaagtgtctaggcacagcgcattttaatcagctcatgattgagcgaggagaccaagctactagctatgttgcgccagtagtagttgagggtacaggtaatccgactggactatttaaagacctcaaagagattagcttagagctgacagatactgctaattcccagctttggtcaaaaatcaagctgactaaccgtggtatgttgcaggaatactacgacggtaagatcaagaccgagatagtcaactccgccagaggtgtcgctacacgtatcagcgaggatactgataaaaagctagcgctcatcaatgacaccattgatggtatcaggcgtgagtatcgagatgctgataggaagctatccgcaagctatcaggcaggcatcgaggggctaaaagccacaatggccaatgataaaatcggtttacaagctgagattaaagcctcagcacaagggctatcgcaaaagtatgatgatgagttgcgcaagctatcggctaagatcacaacaacctcaagcggcactacagaggcctacgagagtaagcttgcgggcttacgtgctgagtttactcgctcaaatcaaggcacgaggacagagctcgagtcacaaattagcgggctaagagcggtacagcagtcaacagctagccaaatctctcaagagattagagaccgtgaaggtgctgtcagtcgtgtgcagcagagtttggagagttaccaaaggcggatgcaggacgcagaagaaaactatagtagcttgacccatacggttagagggctacagagcgacgttggatctccgactggtaaaatccaatcgcgccttactcaactagcaggacaaattgagcagcgggttactagagatggtgtcatgagtattattagtggcgctggagacagcattaaattagctatccaaaaggctggcggcattaatgccaaaatgtctggtaatgagattatctcagcaattaacctcaactcctacggagtaacaatcgcaggtaaacacatcgctctcgatgggaatacgacggttaatggcacctttaccacaaaaatagccgaggctatcaagattagggctgatcagattattgcaggcacgattgacgctgctaggattagagtgattaaccttaacgcaagtagtatcgttggtttagacgctaactttatcaaagctaaaattggctatgctatcactgatttgctcgagggtaaggtcattaaggctcgtaatggagcgatgcttatcgacttaaatacagctaagatggactttaatagcgatgccacaattaattttaatagcaaaaacaatgccttagtacgtaaagatggcacacatactgcctttgtacattttagtaatgcgacgcccaaaggttatacagggtcagcgttgtatgcatcgatcgggataacctcatctggtgacggtgttaactcggcttcttccggtcgttttgcagggctaaggtcatttaggtacgctacgggatataatcacactgcggcagtcgaccagactgaaatttacggtgataatgttttagttgtggatgattttaatattactcggggatttaagtttagaccagacaagatgcaaaaaatgcttgacatgaacgacttgtatgcggctgtagtagccttaggccgctgttgggggcacttggctaacgtcggctggaatactgctcatagcaattttacaagtgctgtgaatagggaattgaataactacatcacaaaaatttaa

SEQ ID NO: 32 - DNA, 1203 bp, Streptococcus pyogenes
atgacctttttagataaaattaaacaaggctgtttagatggctgggctaagtacaaaatcttgccatccttgaccgcagcacaagctatcttagagagcgggtggggcaaacatgccccacacaacgctctgtttggtattaaggcagatagctcttggactggtaaatcatttgataccaaaacccaagaggaatatcaagcaggtgttgtcacggatattgtggaccgatttagggcgtatgatagttgggatgagtcgatagctgatcacggacaatttttagttgataatccacgctatgaggcagttattggggagactgactataaaaaggcttgttacgctattaaagcagctggatacgctacggcaagtagctatgtcgaacttttaatccaactgattgaggaaaacgacttacaaagttgggatagagaagctcttaaaaataataaggaggaaacgatgacaaccgcaaacgaaattgtacaatactgtgttaaccttgctaattcaggcatgggtgttgacaaagacggtgctcacgggacgcaatgctgtgacttgccttgttttgtcgctaaaaattggtttggtgttgatctttggggcaatgcgattgatttattagacagcgcaagtgcgcaaggctgggaagtccatcgtatgccaacagaggcaaacccaaaagcaggcgctacatttgtccaatcagtgccgtatcatcaatttggacatacgggaattgttatcgaggatagtgacggttacaccatgcgcactgtcgagcaaaacattgatggcaatcctgatgctttgtatgtcggtgcaccagctcgttttaacactcgtgactttactggcgtgataggttggttttacccaccatatcaaggggatacagtcacgcaaccagtcagcaccgagccgcaaacttctgacactatcgtagagacagcaaaaacaggcacctttacccttgatgttgcagagatcaatatcagacgctggccaagtctagccagcgaggttgtaggtatctacaagcaaggtgatactgtcagctttgatagcgagggctacgctaatggctattattggattagctatgttggaggctcaggtatgcgtaactacctaggtattggacagactgataaagatgggaatcgcatcagcctttggggtaaattaaattag

SEQ ID NO: 33 - DNA, 708 bp, Streptococcus pyogenes
atgaaaaagattaacatcatcaaaatagttttcataattacagtcatactgatttctactatttcacctatcatcaaaagtgactctaagaaagacatttcgaatgttaaaagtgatttactttatgcatacactataactccttatgattataaaaattgcagggtaaatttttcaacgacacacacattaaacattgatactcaaaaatatagagggaaagactattatattagttccgaaatgtcttatgaggcctctcaaaaatttaaacgagatgatcatgtagatgtttttggattattttatattcttaattctcacaccggtgagtacatctatggaggaattacgcctgctcaaaataataaagtaaatcataaattattgggaaatctatttatttcgggagaatctcaacagaacttaaataacaaaattattctagaaaaagatatcgtaactttccaggaaattgactttaaaatcagaaaataccttatggataattataaaatttatgacgctacttctccttatgtaagcggcagaatcgaaattggcacaaaagatgggaaacatgagcaaatagacttatttgactcaccaaatgaagggactagatcagatatttttgcaaaatataaagataatagaattatcaatatgaagaactttagtcatttcgatatttatcttgaaaaataa

SEQ ID NO: 34 - DNA, 942 bp, Streptococcus pyogenes
atgataacaacttttgaaacaattttagataaaataaaagctcaccaaactattattatccatcgccatcaaaatcctgaccctgatgctcttggtagtcaggccggcttgaaagaaattattgcacaaaatttcccagacaaaaaggttttgatgactggttttgatgagcctagtttagcttggattagccaaatggatcaggtgactgacaaagactataaagaggctttggtcatcattacagatacagcgaatcgaccaaggattgatgatgagcgctacacactggggaagtgcttaattaagattgatcaccatcccaacgatgatgtgtatggtgacttctattatgtggacacaagcgcttctagcgcaagtgaaatcattgcagactttgcctttagtcagaatcttactctctctgacaaggctgctaagctcttatacaccggtatcgttggtgatacagggcgatttctttatgcctcaaccactagtaaaaccctttccattgctagccaactcagacatttcgagttcgactttgctgcgatttcaaggcaaatggattcgtttcctttgaaaatagcaaagctgcaaagctacgtctttgagcatttaacaattgatgagagtggggctgcttatgtccttgtcagccaagaaaccttaaaacattttgacgtgaccctagcagaaagctctgccattgtctgtgctcctggtaaaattgataacgttcaagcttgggctatttttgttgagttaactgacggcaactaccgtgtgcgtatgcgcagtaaagaaaagattattaatggcattgctaagcgtcacggtggaggggggcatccccttgctagcggagccaactcagctaatttagaagaaaatcaagctattttccgagaactcatcgctgtttgccaagagatttag

SEQ ID NO: 35 - DNA, 1953 bp, Streptococcus pyogenes
atgattgaagaaaataaacattttgaaaaaaaaatgcaagaatacgatgccagtcaaattcaggttctagaagggctggaggctgtccgcatgcgtccagggatgtatattggctcgacagctaaagagggtttgcatcatttagtctgggaaattgttgacaactcaattgacgaagcattagcaggttttgcctctcatattaaagtctttattgaagcagataattccattacagtagtagatgatggccgtggaattccagttgatatccaagccaagacaggacgtcccgccgttgaaacagtttttacagtcttacacgcaggtggtaaatttggtggaggcggctataaggtttctggaggattacatggtgtagggtcatctgttgttaatgctttatcaacacaattagatgtacgtgtttataaaaacggccaaattcattaccaagaatttaaacgcggggctgttgtagcagatcttgaggtcattggaaccactgatgtgactggcacgaccgtacactttacacccgatccagaaatttttaccgaaacgactcagtttgattacagtgttttagcaaaacgtattcaagagttagcctttttgaatcgtggtttaaaaatttccattacagataagcgctcaggtatggaacaagaagaacatttcctttatgaaggtggaattggttcttatgttgaatttttaaatgataaaaaagatgttatctttgaaacgcccatctatacagatggtgaattagaaggtattgcagttgaagtagccatgcaatacacgactagctatcaagaaacagtcatgagttttgctaataatattcatactcatgaaggtggaacgcatgaacaaggctttagagcggctcttactcgggtcatcaatgactacgctaagaaaaataaaattcttaaagaaaatgaggacaatttgacaggagaagatgttcgtgaaggtttgacggcggtaatttctgttaagcatccaaatcctcaatttgaaggtcaaaccaaaacaaaattgggcaactcagaagtggttaagatcactaatcgtctctttagtgaggcctttcaacgttttcttttggaaaacccacaagttgctcgtaagattgtggaaaaagggattttggcttctaaagctagaattgcagctaagcgagcccgcgaagtcacccgcaaaaaatcaggcttagaaatttcaaacttacctggaaaattagcagactgttcgtcaaatgacgctaaccaaaacgaacttttcatcgtcgaaggagattcagcgggtgggtcggccaaatcaggtcgtaaccgagagtttcaagctatcttgcctattcgcggtaaaattttgaacgtggaaaaagcaactatggataagattcttgccaacgaagaaattagaagtctctttaccgctatgggtacaggttttggtgcagattttgacgtgtcaaaagctcgctaccaaaagctggttatcatgaccgatgccgatgtggatggcgctcatattagaaccttacttttaaccttgatttaccgctttatgagacctgttctagaagctggctatgtttacatcgcccagccacctatttatggtgttaaggtcggtagtgagattaaagagtatattcagccaggtattgatcaagaagaccaattaaaaacagctcttgaaaaatatagtattggtcgttcaaaaccaactgttcaacgttataaaggtcttggggaaatggatgaccatcaactttgggaaactactatggatcctgaaaatcgtttgatggcgcgtgtgacagttgatgatgccgcagaagcagataaagtatttgatatgttaatgggagatcgtgttgaaccaagacgtgatttcattgaggaaaatgcggtttatagtacactggatatttag

SEQ ID NO: 36 - DNA, 6138 bp, Streptococcus pyogenes
atgcgtaaggtcaaaaaagtctttgttagttcatgtatgcttttaacagtgggcctcggagttgccgtacctactggattcagccaatctaatggcgtgatggttgtaaaggctgcggaagtgccggcgacagatttatcacgtcaggcgtctgattcggagagggtagatgaatcgtctttattgcagaaagaaaacttatcagtagattcatttaaattagaaaatttaaatggatgggaagctgaaaatgatacagcaggtaatttggggaaatttaaagatccagatagttcgggctatcaaaatattttgacatcatctggaaagaatatcagtgtagctgttgctcccaaaggttcaggtaaaatgaacattaaagtaactaaaagatcaaattttcagggtggatattatgtaggtggtcttagaactcaaactccggtattgaagttaaatgatgtttatcgatattcttttacaactaaaaaattatcaggaaattcttcagagttcaaaacgagagttaagcccgttgaatctaataataaactagggaaagagcttgttattagggtggataataaaaatgtatctactaagcatgattggcttccagacatctctgatggaactcatactgtggacttcactggtcttgataaaaaattatctgttgctttcagattttctccaagacaaacttcgaatgttgtttacgaattttctaacataaatataaaaaacattagtcctgcatcagtgccggctattccttcgaaagttttagagggaaccagcgtcttgtcgggtactgcaatatcttctggagatacattagaaaaaagaaaatcgtttgatggcgatatcctaagagtttataaagatagcaaaatcattgctagaacagtaataaaaggcaataagtgggatgttaaactttcaaagcctcttattgcaggtgaaaaattagattttgagattttgcatccgagatctcaaaacgttagtaaaaaaatttcaaaacaagtcgaagctaaaccatttgatccagcttcctataaagaaaaagttatagccaaattaaagccggtttatgaagctactagtgaaaaaatcacaaatgatgcttggttggatgaaaatgcgaaggatttgcaaaaacaaaaattagaagaacaatatatttctggaaaagtagcgatatcagaggctggaactaaacaagaagctatagatgcagcatataataaatattcaagtcaaacagatccagactctcttcctagtcagtataaacaaggtaataaagaaaatgaacaagaaaaagggcgtcaagatttaatccagactcgtgatctgacgttgaaagccattcaagaagacaaatggctaacagagcaggagaaaacaattcaaaaagaagaagcattaaaagcttttgaaactggtatagaaagtgttaatcaaacagtatcattagaacagttgaagcaacggttaatagtgtataaagcttctgaaaaagattcagagaaaaaagaatatcctgagtcaattcctaatcagcatattccagggaaagaaaaagaagttaaagctgctaaacaagaagaacttaaaaaattacatgacacaactcttgaaaaaatcaatcaagataaatggttgacgccagaccaacaagctgaacagttaaaacaagcggaagttacttttaaaaaaggccaagaagcaattaaaagtgctcagactttaactcagcttgagacagacttagctgattatgtttctgagaatgaaggtaagggaaattctattcccgataaatacaaatctggcaataaagatgatttggtaaataaggctgaagttaaacttaaggaagctcacgaagctactaaacaagcaattgaaaaagatccatggttgagtccggaacagaaaaaagctcaaaaagaaaaagccaaagcaagactagatgagggcttgaaagctcttaaagctgcagatagtttagagattcttaaagtgacagaagaagctttcgttgataaagaaaaaaatccagattcaattccaaatcaacataaagctggaactgctgatcaagctagaaaacaagctttagatagtttagataaggaggttcaaaaagagttagagtcaattgataacgataatactctaacaactgatgagaaagcagctgctaagaaaaaagtcaatgacgcttatgatgtagctaagcaaacagctatggaagccaattcttatgaagatttgactactattaaagatgagttcttatctaatttacctcataaacaaggaacgccgcttaaagatcaacaatctgatgctattgcagaattagagaagaagcagcaagaaattgaaaaagctattgagggtgataaaacattaccaagagacgaaaaagagaaacaaattgctgactctaaggaacgcttaaaatctgacacgcaaaaagttaaagatgctaaaaatgctgatgctattaaaaaagcatttgaagaagggaaagtgaatattcctcaagcacatatcccaggtgatttgaacaaggataaagaaaaacttcttgcagaattgaagcaaaaagcagatgatactgaaaaagctattgatgttgataaaactctgacagaagatgagaaaaaagagcaaaaagtcaaaacaaaagctgaacttgaaaaagctaaaactgatgttaaaaatactcagacacgtgaagaactagataaaaaagttccagaacttaagaaagctattgaagacactcacgttaaaggtaatcttgaaggtgttaagaataaggctattgaagatcttaaaaaagctcatactgaaacagttgctaaaataaatggtgatgatacccttgacaaagctactaaagaagctcaagtgaaagaagctgacaaagctttggcagcaggtaaagatgcgatcactaaagcagatgatgctgataaagtaagtacagctgttacagagcacacaccaaaaattaaagcagcacataaaactggtgaccttaaaaaagctcaagtagatgctaacacagctcttgacaaagcagctgaaaaagaacgtggagaaatcaataaagatgctacactaacgacagaagataaagcaaaacaactgaaagaagttgagacagctcttactaaagctaaagataacgtgaaagctgctaagacagcagacgctatcaatgacgcacgtgataaaggcgtagcaacaattgatgccgtccataaagcaggtcaagacttaggtgctcgtaagtcaggtcaagtcgctaaacttgaagaagcagctaaagcaacgaaagacaagatttcagctgatccaactttgacaagcaaagaaaaagaagagcaatctaaagctgttgacgctgaacttaagaaagcgatagaagctgttaacgcagctgacacagctgacaaggttgacgatgctcttggtgaaggtgttacagacatcaagaaccaacacaagtcaggtgactctatcgacgctcgtcgtgaggctcatggtaaggaacttgatagagtcgctcaagaaactaaaggtgcgattgaaaaagaccctactttgacgactgaagaaaaagctaaacaagttaaagacgtagatgccgctaaagaaagaggcatggctaagcttaatgaagctaaagatgctgatgctttagacaaagcttacggtgaaggtgttacagacatcaagaaccaacacaagtcaggtgaccctgtcgacgctcgtcgtggattacacaacaagtcaatcgacgaagtggcgcaagcaactaaggacgctatcacagcagatacgactttgactgaagctgaaaaagaaacacaacgtggcaatgttgataaagaagcaactaaagctaaagaagaacttgctaaggctaaagatgctgatgctttagacaaagcgtacggtgacggtgtaaccagcatcaagaaccaacacaagtcaggtaaaggtcttgacgttcgtaaagatgagcacaagaaagctcttgaagctgttgctaaacgtgtcactgctgaaattgaggctgatccaaccttaacaccagaagtgagagaacaacaaaaagcagaggttcaaaaagagcttgaacttgcgactgataagattgctgaagctaaagatgcagatgaagcagacaaagcttacggtgacggtgtcacagcgatcgaaaatgcccacgttattggtaaaggtatcgaagctcgtaaagaccttgctaagaaagaccttgctgaagctgctgctaagacaaaagctctcattattgaagacaaaacgcttactgatgatcaacgtaaagaacagttattaggtgttgatacagagtatgctaaaggtatcgagaatattgatgcagctaaggatgctgcaggtgttgataaagcatatagtgacggtgttcgtgacatcctggcacagtacaaagaaggtcaaaaccttaatgatcgtcgtaatgctgccaaagaatttcttcttaaagaagcagacaaagtgacgaaactaatcaatgatgatccaaccttgactcatgaccaaaaagttgatcaaatcaacaaagttgaacaagctaagttagacgcaatcaagtctgttgatgatgctcaaacagctgatgctatcaatgatgctcttggtaagggtattgaaaacatcaacaaccaataccaacatggcgatggcgttgatgttcgtaaagcgactgccaaaggcgatcttgaaaaagaagctgctaaagtgaaagctcttattgctaaggatccgaccttaactcaagctgataaagacaaacaaacagcagcggttgacgcagctaagaatacagcaattgcagcggttgataaagcgacaacaactgaaggcattaaccaagaacttggtaaaggcatcacagctatcaataaagcttaccgtccaggtgaaggtgttaaagcacgtaaagaagccgctaaagctgatcttgaaaaagaagctgctaaagtgaaagctcttattactaacgacccaaccttaacaaaagctgataaagctaaacaaacagaagctgttgctaaagcccttaaagctgctatcgcagcggttgataaagcgacaacagctgaaggcattaaccaagaacttggtaaaggcatcacagctatcaataaagcttaccgtccaggtgaaggtgttaaagcacgtaaagaagccgctaaggctgatcttgaaagagaagctgctaaggttcgtgaagctatcgctaacgacccaaccttaacaaaagctgataaagctaaacaaacagaagctgttgctaaagctcttaaagctgctatcgcagcggttgataaagcgacaacagctgaaggcattaaccaagaacttggtaaaggcatcacagctatcaacaaagcttaccgtccaggtgaaggtgttgaagcacataaagaagctgctaaagctaatcttgaaaaagtagctaaagaaactaaagctcttatttcaggagaccgttacttgagcgaaactgaaaaagcagtccaaaaacaagctgttgagcaagctcttgcgaaagcacttggtcaagttgaggctgctaagacagttgaagctgttaagttggcagaaaaccttggtactgtagctatccgttcagcatatgttgctggtttagctaaagatactgatcaagcaacagctgctcttaacgaagcgaaacaagctgctattgaagctcttaaacaagctgcggcagaaacacttgctaagattacaactgatgctaaattgactgaagctcaaaaagctgaacaatcagaaaatgtatcattagcgcttaagacggctattgcgactgttcgttcagcacaatctattgcgtctgtgaaagaagcaaaagataaaggtattactgctatccgtgcagcctatgtgcctaataaggcagtcgcaaaatcatcgtcagcgaaccatcttccaaaatcaggtgatgcaaactcaattgttcttgttggcttaggagttatgtctcttcttttaggtatggtgctttatagcaagaaaaaagaaagtaaagactaa

SEQ ID NO: 37 - DNA, 2733 bp, Streptococcus pyogenes
atgattaacaagaaatgtataatacctgtttcattgttgacactagctattacgcttactagtgttgaagaagttacttcacgccaaaatttgacttatgccaatgaaatcgtaacacaaaggccaaagagagaatctgttattagtgataaatcgaattttcccgtcatatcaccttacctagcaagtgtggattttggtgagagaaaaacacctttgccaacacctgataaaggagtaaaagtaactactgaacagtctattgctcaagtaagaaaggggcctgaagaaagaccctatactgttactggcaagattacgagtgtgatcaatggctggggaggctatggcttttatattcaagatagtgaaggtattggactttatgtttatcctcaaaaagatttaggatacagtaagggagatattgttcaattaacaggtacacttactcgctttaaaggtgatttacaactccaacaggtgactgcacacaaaaagttagagttatcttttccgacttctgttaaagaagcagtaatatcagaattagaaacaacaacaccctcaacattagttaagttatctcacgtgacagttggagaattatcaactgatcaatataacaacacatctttccttgtaagggatgatagtggtaaaagtatagttgttcatatagatcatcgtacaggggttaaaggggctgatgttgttactaaaataagtcagggtgatttgattaacctcacagccatattgtctattgttgatggtcaattacaattaagaccgttttctcttgaacaattggaagtggttaaaaaggtcacaagctcaaatagtgatgcttcatctcgtaatattgtgaaaataggcgagattcaaggagctagtcatacgtcgccacttctcaaaaaagcggtcaccgtagaacaggttgttgtcacttatttagacgattccactcatttttatgttcaagatcttaatggtgatggtgatttagcgacttcagatggtattcgtgtttttgctaaaaacgctaaggttcaagtcggcgatgttttgaccatttcaggtgaagtggaagaattctttggtcgtggttatgaggaacgtaagcagactgaccttaccatcacccaaattgtggctaaagcagtgaccaaaacagggacagctcaagttccatcaccgcttgttttagggaaagatcgtatcgcgccagccaatattattgataatgatggcttgcgtgtgtttgatccagaagaagacgctattgattattgggaatcaatggaaggcatgttagtggcggttgatgatgctaaaatccttggtccaatgaaaaataaagaaatttatgtcttacctggctctagtacaagaccgttaaataattcaggtggagtattacttccagctaattcttataacacagatgtgattcctgttcttttcaaaaaaggcaaacaaattattaaagcaggagactcttacaaaggaagattagctgggccagtatcttatagctatggtaattacaaggtctttgttgatgacagcaaaaacatgccaagtttaatggatggtcatctaaaacctgaaaaaacaaacttgcaaaaagaccttagcaagttaagcattgcttcttacaatattgaaaacttctcagccaatccttcttcaactaaagatgagaaggtcaaacggattgccgaatcctttattcatgatctgaatgctccagacattattggattaattgaagtccaagataataatgggccgactgatgatgggacaacggatgcgacacaaagcgcgcaacgcctcattgatgctattaaaaaactaggtggcccaacttatcgttatgttgatattgctccagaaaataatgttgacggaggtcaaccaggtggtaatattcgaacaggattcctttatcaaccagagcgcgtcagcctttctgataagccaaaaggcggtgctcgtgatgctctaacttgggttaatggagaattaaaccttagtgttggtcgaattgatccaactaacgccgcttggaaagatgttcgtaaatcactagcagcagaatttatcttccaaggtcgtaaagtcgttgttgttgcaaatcatttgaactctaagcgtggggataatgctctttatggttgtgtgcaaccagtcacttttaaatctgagcaaagacgtcacgtcttggctaatatgctagcacaatttgcgaaagaaggggcaaaacaccaagctaatattgtgatgctaggtgactttaatgattttgaattcacaaagacgattcaattaatcgaagaaggtgacatggttaacttggtgagccgacatgatatttcagatcggtattcttattttcaccaaggcaataatcagacccttgataatatattagtttcacgccatttacttgatcactacgaatttgacatggttcatgtgaattccccatttatggaagctcacggacgcgcatcagatcatgatccattgttacttcaattatcattttccaaagaaaatgataaggcagagtcttctaaacaaagtgtaaaagctaaaaaaacttcaaaaggaaaactgttgccaaaaacaggagatagtcttgtttatgtgataacgctactaggaacggctagtttattagtgcctattttattattgactaaaggcaaaaaggaatcatag

SEQ ID NO: 38 - DNA, 3633 bp, Streptococcus pyogenes
gtgatttcttttgccccatttttaagccccgaagctattaaacatttgcaagaaaacgaaaggtgcagagatcagtctcaaaaacgcacagctcaacaaattgaagcaatttatactagtggccaaaatatacttgtatcagcttctgctggttcaggaaaaacctttgtaatggtcgaacgcatacttgataaaattttgagaggtgtttcaattgatcggctttttatctcaacctttactgttaaagcagctacagaactgcgtgagcggattgaaaacaaattatactcacaaattgctcaaactacagattttcaaatgaaagtttatttaacagaacaattgcaatctctttgtcaagctgatattggtactatggatgcttttgcacagaaagtagtaagtcgctatggttatagcattggcatttcatcccaatttcgtatcatgcaggataaagcagaacaagatgttttaaagcaagaggtgtttagcaaactctttaatgagtttatgaatcaaaaagaggcaccggtgtttagggctcttgtgaaaaatttttctggtaactgtaaagacacttcagcttttagagagttagtttatacttgttattcttttagccaatcgacagaaaacccaaaaatatggttgcaagaaaattttctaagcgctgctaaaacttaccaaagacttgaagatatcccggatcatgatattgaactcttacttttggcaatgcaagacactgcaaatcagctaagagatgtgactgatatggaagattatgggcagctgactaaggcaggtagccgatctgctaaatacactaaacacttaacgatcatagaaaagttgtctgattgggtgcgtgattttaaatgtttgtatggaaaagccggattggatcggttgatcagagatgtgacaggccttataccatctgggaatgatgttacagtctcgaaggtaaaataccctgtttttaagaccttgcatcaaaaattaaaacaatttaggcatttagaaacaattttaatgtatcagaaagactgtttttccttattggaacagttacaagattttgtgcttgcgttttcagaagcttatttagctgtcaaaatacaagaaagtgcttttgaattttcagatattgcacactttgcaatcaaaattttagaggaaaatacggatattcgccaatcctatcagcaacactatcatgaggtgatggttgatgaatatcaagataacaatcatatgcaagagcgactcctgaccttactatcgaacggtcataatcgctttatggtaggagatatcaaacaatcgatctatcgatttcggcaagccgatcctcagatttttaatcaaaagtttagagactatcaaaaaaaacctgagcaggggaaagtgattttactcaaagaaaactttcgtagccaatcagaggtgttaaatgtcagcaatgctgtttttagtcacttaatggacgaatcagtaggagacgtcttatacgatgagcaacatcagttaatagcaggtagtcatgctcaaacagtcccctatctagaccgtcgtgctcagttattgctatataatagcgataaagatgatggcaacgccccttcagatagtgagggtatttcatttagtgaggttacaattgttgccaaagaaattattaagcttcacaatgataagggtgtcccttttgaagacattacgttactcgtttcttcaagaacaagaaatgatatcatttctcatacattcaatcaatatggtattcctatagcaacagatggtgggcagcaaaactatcttaaatctgttgaagtgatggttatgttagatacattacgcaccattaataacccaagaaatgattatgcccttgtggctttactgcgctcaccgatgtttgcctttgatgaggatgatttagcaagaatagcacttcaaaaagacaatgagctagataaagattgcctatatgacaagatacaaagggctgtgattggaagaggtgctcatcctgaattgattcacgataccttgcttggcaagttaaatgtttttttaaagacgttgaaaagctggcgtcgatacgctaagctagggtcgttgtatgacttgatttggaaaatttttaatgatcgtttttattttgattttgtagctagtcaagcaaaagcagaacaagcacaagctaatctatacgcattagctctacgtgctaatcagtttgaaaaatcgggctataaagggctataccgttttattaaaatgattgataaggtacttgagacgcaaaatgacttagctgatgtggaagtggctactcctaaacaagctgttaatttaatgaccattcacaagtctaaaggtttacaatttccgtatgtatttatccttaattgtgacaagcgcttctcaatgacagatattcataaatcatttattctgaatcggcagcacggtatcggtatcaagtaccttgcagatatcaaaggtttacttggtgaaacaacactcaattctgttaaagtaagcatggaaaccttaccttatcaattgaacaaacaagagttgcgcttagcaactttatcagaagaaatgcgcttactgtatgttgctatgacacgagctgaaaaaaaagtttattttattggtaaagctagtaagagcaaaagtcaagaaatcacagatcctaaaaagttaggcaaacttttgccgctggctttacgagaacagttattgacattccaagattggctattagcaatagcagatatattttcaactgaagatctttattttgatgttcgctttattgaagatagtgatttgacacaagagtcagtcggacgacttcaaacaccacagttattaaatccagatgatcttaaagataatcgtcaatcagaaacaattgcacgggctttagatatgttagaagcagtgtctcaattgaatgccaattatgaagcagctattcatttgccaacagttcgaacgcctagccaacttaaggcaacttacgagcctttattagaacccattggtgtagatattatagagaaatcttctcgatcgctatctgattttactttgccacatttttcaaaaaaagcaaaagttgaagcaagtcatattggatcagctcttcatcagttgatgcaggtgctccctttgtcaaaaccgataaatcaacaaacgcttttagacgctttaagaggaattgatagtaacgaagaggtaaaaacagctcttgatctcaaaaaaatagagtcgttcttttgtgatacaagcctaggccaattttttcagacttaccaaaaacacttgtatcgagaagcgccatttgctattttaaaacttgaccctatcagtcaagaagagtatgtcctacgtggtattatagatgcctactttttgtttgatgatcatattgtattagtggactataaaacagataaatacaagcagcccattgagttaaaaaagcgttaccaacaacagttggagttatatgcagaagctctcactcaaacgtataaacttcctgtgactaagcgctatcttgttttaatgggaggtggaaagccagaaattgtcgaagtttaa

SEQ ID NO: 39 - DNA, 762 bp, Streptococcus pyogenes
atggtaaaaacggattttaaattacgctatcaagggagcgcaattggctatctatggtctatcttaaaaccgcttatgatgtttacgattatgtacttggtatttattcgttttcttcgcctgggtggaaatgtacctcattttccagtagcgcttttattggcaaatgtcatctggtcttttttttcagaagcaactagcatgggaatggtatctattgtatctcggggagacttgttgcgaaaattgaacttttctaagcacatcattgttttttcggcagtgttaggagctttaattaattttcttattaatttggttgttgttttaatttttgcgttgataaatggtgtgactatatcagggtatgcttatctctctctttttctttttatagaattagttgttttagtgcttggaattgcattgttattgtcgaatgtctttgtttattatcgtgacttagctcaagtctgggaagtactattacaagcaggtatgtatgccactccaatcatttatccgatcacttttgttttagatagccaccctttggcggcaaagttgttgatgctaaatccagtagcacaaatgattcaagattttcgttatttattgattgacagggccaacgtaacgatttggcagatgtcaaccaattggttttacattgttattccatatttagtaccatttgttatattatttattggcatctttgtctttaagaaaaatgccgatagatttgcggagattatttaa

SEQ ID NO: 40 - DNA, 1734 bp, Streptococcus pyogenes
atgacatttttatctgatttgatatcattaatgacaaaaatcagattatcttgggtaataaaggcgggtatttttcaattattatttgtaacgattgctaatattgtcttatcagaatttttctattttatattagacgttactggtcaatatcatttagataaagacaatgttgtgacttttttaaaaaatcctatagcacttgctttattaggtgcctatttatttttattagctgcttttattcaccttgagttttttgctctatatcgaattattgcggatcaagaaattagtttctatctttttagaaaacagttttcttattacctaagggggctttggaaaacattttctggttaccaattattactttttttgctttatatcctattgactattccagtcttacatattggtttatcttctgtgattactcaaaagctttatcttccagaatttattgttggggaattatcaaagataactagcacaaagtacttgctttatggcagtcttattcttgtgttttaccttaacctaagattagtatattttttaccattgatagcaatcaaccatcgtacggttgctcaagcatggagagagagttggcaaaagactaaaaagaaacatgtattgttatggatgaaactttttgcaatcaatggtcttacgattgtagtcttatcgctagctatttccatgattcttatttttgttgatatgtttaatcctaaggggaataatattattgttcagctgggagctttgacctttacatgggaactcattttttttactactattttttttaaactctgttcagcaatgattttaaaagaggcaattgaaccacaaaagcaatatgatgagccaagaagaagtaataaggcatatgttgtaatctttatcgtggttacagtaggttttgcttatcaatctcttgaacgtttaactttttttgacacatctcactctaagacagttatcgcgcatagaggacttgtatcagcaggtgtagaaaattctctggaagcccttgaaggtgctaagaaagcaggaagtgattatgtagaactggatctaatcttgactaaggataatcactttgtggtgtctcatgataatcgattgaagcgtttagctggagtaaataagacgattcgcaacttaaccttaaaagaagttgaacatctaacgagtcatcaaggacatttttcagggcgttttgtttcttttgacactttttatcaaaaggctaagaagttgaatatgccattacttattgaactcaagccaattggtacagaacctggaaattatgtcgatttgtttttagaaacttatcatcgacttggtataagcaaagataataaagtcatgtctttagatttagaagtaatagaagctatcaagaaaaaaaatccatcaattacgactggttatatcataccaattcaatttggattttttggagatgaatttgttgatttctatgtcattgaagacttttcttatcggtcttatttgtcgtcccaagctttttggaataataaagaaatttacgtttggactattaatgatcccaagcgcatagagcattatctcctaaagcctattcagggaattattacagaccaaccagctttaactaatcaattgattaaagacttaaaacaagataattcttattttagtcgattagtcagaattattagtagtctttattaa

SEQ ID NO: 41 - DNA, 3027 bp, Streptococcus pyogenes
atgaagaaacatcttaaaacagttgccttgaccctcactacagtatcggtagtcacccacaatcaggaagtttttagtttagtcaaagagccaattcttaaacaaactcaagcttcttcatcgatttctggcgctgactacgcagaaagtagcggtaaaagcaagttaaagattaatgaaacttctggccctgttgatgatacagtcactgacttattttcggataaacgtactactcctgaaaaaataaaagataatcttgctaaaggtccgagagaacaagagttaaaggcagtaacagagaatacagaatcagaaaagcagatcacttctggatctcaactagaacaatcaaaagagtctctttctttaaataaaacagtgccatcaacgtctaattgggagatttgtgattttattactaaggggaatacccttgttggtctttcaaaatcaggtgttgaaaagttatctcaaactgatcatctcgtattgcctagtcaagcagcagatggaactcaattgatacaagtagctagttttgcttttactccagataaaaagacggcaattgcagaatataccagtagggctggagaaaatggggaaataagccaactagatgtggatggaaaagaaattattaacgaaggtgaggtttttaattcttatctactaaagaaggtaacaatcccaactggttataaacatattggtcaagatgcttttgtggacaataagaatattgctgaggttaatcttcctgaaagcctcgagactatttctgactatgcttttgctcacctagctttgaaacagatcgatttgccagataatttaaaagcgattggagaattagctttttttgataatcaaattacaggtaaactttctttgccacgtcagttaatgcgattagcagaacgtgcttttaaatcaaaccatatcaaaacaattgagtttagaggaaatagtctaaaagtgataggggaagctagttttcaagataatgatctgagtcaactaatgctacctgacggtcttgaaaaaatagaatcagaagcttttacaggaaatccaggagatgatcactacaataaccgtgttgttttgtggacaaaatctggaaaaaatccttctggtcttgctactgaaaatacctatgttaatcctgataagtcactatggcaggaaagtcctgagattgattatactaaatggttagaggaagattttacctatcaaaaaaatagtgttacaggtttttcaaataaaggcttacaaaaagtaaaacgtaataaaaacttagaaattccaaaacagcacaatggtgttactattactgaaattggtgataatgcttttcgcaatgttgattttcaaaataaaactttacgtaaatatgatttggaagaagtaaagcttccctcaactattcggaaaataggtgcttttgcttttcaatctaataacttgaaatcttttgaagcaagtgacgatttagaagagattaaagagggagcctttatgaataatcgtattgaaaccttggaattaaaagataaattagttactattggtgatgcggctttccatattaatcatatttatgccattgttcttccagaatctgtacaagaaatagggcgttcagcatttcggcaaaatggtgcaaataatcttatttttatgggaagtaaggttaagaccttaggtgagatggcatttttatcaaatagacttgaacatctggatctttctgagcaaaaacagttaacagagattcctgttcaagccttttcagacaatgccttgaaagaagtattattaccagcatcactgaaaacgattcgagaagaagccttcaaaaagaatcatttaaaacaactggaagtggcatctgccttgtcccatattgcttttaatgctttagatgataatgatggtgatgaacaatttgataataaagtggttgttaaaacgcatcataattcctacgcactagcagatggtgagcattttatcgttgatccagataagttatcttctacaatagtagaccttgaaaagattttaaaactaatcgaaggtttagattattctacattacgtcagactactcaaactcagtttagagacatgactactgcaggtaaagcgttgttgtcaaaatctaacctccgacaaggagaaaaacaaaaattccttcaagaagcacaatttttccttggccgcgttgatttggataaagccatagctaaagctgagaaggctttagtgaccaagaaggcaacaaagaatggtcagttgcttgaaagaagtattaacaaagcggtattagcttataataatagcgctattaaaaaagctaatgttaagcgcttggaaaaagagttagacttgctaacaggattagttgagggaaaaggaccattagcgcaagctacaatggtacaaggagtttatttattaaagacgcctttgccattgccagaatattatatcggattgaacgtttattttgacaagtctggaaaattgatttatgcacttgatatgagtgatactattggcgagggacaaaaagacgcttatggtaatcctatattaaatgttgacgaggataatgaaggttatcatgccttggcagttgccactttagctgattatgaggggctcgacatcaaaacaattttaaatagtaagcttagtcaattaacatctattcgtcaggtaccgactgcagcctatcatagagccggtattttccaagctatccaaaatgcagcggcagaagcagagcagttattgcctaaaccaggtacgcactctgagaagtcaagctcaagtgaatctgctaactctaaagatagaggattgcaatcaaacccaaaaacgaatagaggacgacactctgcaatattgcctaggacagggtcaaaaggcagctttgtctatggaatcttaggttacactagcgttgctttactgtcactaataactgctataaaaaagaaaaaatattaa

SEQ ID NO: 42 - DNA, 2013 bp, Streptococcus pyogenes
atgaaaaaatattttattttaaaaagtagtgtattgagtatcctgactagttttactctattagttacagatgttcaagcagatcaagttgatgtgcaattccttggcgtcaatgattttcacggcgctcttgataataccggaacagcttacacaccaagtggtaaaataccaaatgctgggacggctgctcaattaggtgcttatatggatgacgctgagatagacttcaagcaagcaaatcaagacggaacaagtatacgtgttcaagctggagatatggtcggagccagtcctgctaactctgcacttttacaagatgagcctactgtcaaagtctttaacaaaatgaaatttgaatatggcactcttggtaatcatgaatttgacgaaggactagatgaatttaaccgtatcatgacaggtcaagcgcctgatcctgaatcaacaattaatgatatcaccaaacaatatgagcacgaagcttcgcatcaaaccatcgtcattgctaatgttattgataaaaaaaccaaggatatcccctatggttggaaaccttatgctataaaagacatagccattaatgacaaaatcgttaagattggcttcattggtgttgtgactacagagattccaaatctcgttttaaagcaaaactatgaacactatcaatttttagatgtagctgaaaccattgccaaatatgctaaagaactacaagaacaacatgttcatgctattgtggttttagctcatgttcctgcaacaagtaaagatggtgttgttgatcatgaaatggctacggttatggaaaaagtgaaccaaatctatcccgaacatagcattgatattatttttgcaggacataatcatcaatacactaatggaactatcggtaaaacacgtatcgttcaagccctctctcaaggaaaagcttatgcagatgtccgtggtacgctagatactgataccaatgattttattaaaactccatcagcaaatgttgttgctgtagcaccaggtatcaaaacagaaaattcagatatcaaagctataataaatcatgctaatgatattgttaaaacagttactgaacgaaaaatcggaactgcaactaattcttcaactatttctaaaacagaaaatattgataaagaatctcctgtcggtaacttagcaacaacggctcagcttactattgctaagaaaacttttccaactgttgactttgctatgaccaataatggtggtattcgaagtgacctagttgtcaaaaatgaccggaccatcacctggggagctgcacaggctgtacaaccatttggtaatatccttcaagtcattcaaatgactggtcaacacatttacgatgtcctaaatcagcaatacgatgaaaaccagacctattttcttcaaatgtcaggtttaacatacacttatacagataatgatcctaagaactctgatacccccttcaagatagttaaggtttataaagacaatggtgaagaaattaacttaacaactacttacaccgttgttgtcaacgactttctttatggtggtggtgatggcttttcagcatttaaaaaagctaaattaatcggagctattaacacagatactgaagctttcatcacatatatcacaaatttagaagcatcaggtaaaactgttaatgctactataaaaggggttaaaaattatgtaacttcaaaccttgaaagttcgacaaaagttaatagtgctggtaaacacagtatcattagtaaggtttttagaaatcgtgatggcaatacagtgtctagtgaagtcatttcagaccttttgacttctactgaaaacactaataacagccttggcaaaaaagaaacaacaacaaacaaaaatactatctctagttccactcttccaataacaggggacaattataaaatgtctcctattatgacaatccttgccttgataagcttaggtggactaaacgcttttattaaaaaaaggaaatcctag

SEQ ID NO: 43 - DNA, 789 bp, Streptococcus pyogenes
atgactaataatcaaacactagacatccttttggatgtctatgcttataatcacgcctttagaattgctaaagccttgccaaatatccctaaaactgccctctatttactagagatgttaaaagagcgcagagaattgaaccttgcctttctagcggaacatgcagcagagaatcggaccattgaagaccagtatcactgttcattatggcttaaccaatcgcttgaagatgagcagattgccaattacattttggatttagaagttaaagtaaaaaacggtgctattattgatttcgtcaggtcagtgtcgcctattctttaccgactttttctcagactaatcacgtcagaaattccaaacttcaaggcttatatttttgatacaaagaatgaccaatatgatacctggcattttcaggccatgttggaatctgatcacgaggttttcaaggcttacctgtctcaaaagcagtctcgcaatgtgacgaccaaaagcttagcagacatgttgacgttgacctccttacctcaggaaatcaaggacttggtttttttgttacgacattttgaaaaggctgtccgtaatcctctggctcatttgattaagccttttgatgaagaggaactgcatcgcaccactcatttttcttctcaggcttttttggaaaacattatcaccttggcgactttttctggtgtaatctaccgacgtgagcctttttactttgatgacatgaatgccattattaaaaaggagttgagcctttggagacaatctattgtctga

SEQ ID NO: 44 - DNA, 1290 bp, Streptococcus pyogenes
atgaagacaacatccctgattaaagtagatttgccatcaacaatcggtataggttatggcgctttttggcggtctagaaatttttatcgagtagttaaaggcagccgtggatctaaaaaatctaaaacgactgctttaaattttatcgtcagactgctgaagtacccttgggctaacttattggtcatccgtagatactcaaacactaacaaacaatctacttataccgattttaaatgggcgtgtaatcaattaaaggttacacacctttttaagtttaatgagagtttgccagaaataactgtaaaggcaacgggccaaaagatactgttccgtggacttgatgatgagttaaaaatcacatctattactgtcgatgttggcgctttgtgctgggcttggtttgaagaggcttatcaaattgagaccgaagataagttttcaacagttgtcgaatcaatccgcggtagtttagatgctcctgatttttttaaacagataacagtcacgtttaacccgtggtcagaaagacattggcttaaacgtgtcttttttgatgaagaaactaaacgggctgatacattttctgggactacaacatttagagtaaacgaatggcttgatgatgtcgataaaagacgctacgaagatttgtacaagactaatccaaggcgggctagaatcgtgtgcgatggtgaatggggcgttgctgaaggtcttgtttttgataactttgaagtcgtagattttgatgttgaaaaaacaattcaacgcgttaaagagacctcggccggtatggactttgggtttactcaagaccctacaactcttatatgtgttgcagttgacctcgcaaacaaagagttatggctttacaacgaacattatcaaaaggctatgttaacagatcatattgtcaaaatgataagagataaaaacttgcataggtcttacatcgcaggggatagcgccgaaaaacgcctcattgcagaaataaaaagtaaaggggtgtctggaattgtcccgagtattaaaggtaaagggtcaatcatgcaagggattcaattcatgcaggggtttaagatatatattcacccatcttgcgaacacacaatagaagagtttaatacttacacttttaagcaagacaaagaaggtaattggttaaacgaaccgatagataagaataaccacgttattgatgcgattagatatgcgcttgaaaaataccatatcagaagcaacgagtcaaatcagtttgaagttcttagggctggttttggttactag

SEQ ID NO: 45 - DNA, 534 bp, Streptococcus pyogenes
atggcagaagaaacacaaacagttgaaacggttgaagagcaagtggtaccagaagcaaaacaaccgcaagacgaaaaaaagtacacagatgcagatgtggacgctatcatcgacaaaaagtttgcgaagtggaagtcagaacaagaagcggagaaatcggaagctaaaaaaatggctaagatgaatgaaaaagagaaagcagactacgaaaagcagaagctgttagacgaattgcaagagctaaaaaacgataagacacgcaatgagttaacagcagtagctcgtcaaatgtttgcagaatctgaaatcaacgtcaacgatgacgtacttggtttagttgtgactttggacgcagaacaaacaaaagcaaatgtaacaacgctagcaaacgcatttgctaaagttatcgctgatgaccgcaaggctcttgtacgccagactactccgtcaacaggtggtggattgagcaaacaaaccaattacggtgctaacttggctagtaaggcagcacaacaaagcaccaaacttttttag

SEQ ID NO: 46 - DNA, 711 bp, Streptococcus pyogenes
atgagatataattgtcgctactcacatattgataagaaaatctacagcatgattatatgtttgtcatttcttttatattccaatgttgttcaagcaaattcttataatacaaccaatagacataatctagaatcgctttataagcatgattctaacttgattgaagccgatagtataaaaaattctccagatattgtaacaagccatatgttgaaatatagtgtcaaggataaaaatttgtcagttttttttgagaaagattggatatcacaggaattcaaagataaagaagtagatatttatgctctatctgcacaagaggtttgtgaatgtccagggaaaaggtatgaagcgtttggtggaattacattaactaattcagaaaaaaaagaaattaaagttcctgtaaacgtgtgggataaaagtaaacaacagccgcctatgtttattacagtcaataaaccgaaagtaaccgctcaggaagtggatataaaagttagaaagttattgattaagaaatacgatatctataataaccgggaacaaaaatactctaaaggaactgttaccttagatttaaattcaggtaaagatattgtttttgatttgtattattttggcaatggagactttaatagcatgctaaaaatatattccaataacgagagaatagactcaactcaatttcatgtagatgtgtcaatcagctaa

SEQ ID NO: 47 - DNA, 2418 bp, Streptococcus pyogenes
gtgaatacttatttttgcacacaccataaacaattactactttattcaaacctattccttagctttgctatgatgggccaaggaactgccatttatgccgatacactgacttcaaattcagaacctaataatacttactttcaaacgcaaacgctcactactacagatagcgaaaaaaaggtagtacagccacaacaaaaagactactatactgaattgttagaccaatggaacagtattatcgcaggcaacgatgcttatgataaaaccaatcctgacatggtcacttttcataataaagctgaaaaggatgctcaaaacattattaaaagctatcaagggcctgaccacgaaaatagaacttacctttgggaacatgcaaaggattattccgcttctgctaatatcacgaaaacttaccgcaatattgaaaaaatagcaaaacagatcactaatcctgaatcatgctattatcaagatagtaaagctattgctattgtaaaagacggtatggccttcatgtatgaacacgcttataatctagatcgtgaaaatcatcaaacaactggaaaagaaaacaaagaaaattggtgggtttatgaaattggaactcctcgtgctattaataataccttatccttgatgtatccttattttactcaagaagaaattcttaaatacacagctccaatcgaaaaatttgtgcctgaccctactcgttttagggttcgcgctgccaatttttcaccttttgaagccaatagcggaaatttaattgatatggggcgtgttaaactcatttccggtattcttcgtaaagatgatctcgaaattagtgatacaatcaaagcaattgagaaagttttcacgctagttgatgaaggaaatggtttttaccaagacggttctttaattgatcacgtggttactaacgctcaaagtccactttataaaaaaggcattgcttacactggagcttacggtaatgtgcttatagatggcttatcgcaattaattcctattattcaaaaaacaaagtctcctataaaagcggataaaatggctactatctatcattggattaaccattcttttttccctatcatcgttcgtggagaaatgatggatatgactcgagggcgttctatcagtcgttttaatgcccaatctcatgttgctggcattgaagcacttcgtgctattttacgtattgctgacatgtctgaagagcctcaccgtttggcacttaaaacacgtataaaaacactcgtcacacaagggaatgctttttacaatgtctatgataatttgaaaacctatcacgatatcaaacttatgaaagaactactaagtgatacttctgttccagtccaaaaacttgatagttacgtagctagtttcaatagtatggataaattggcactatataataataaacacgattttgcttttggcctatcaatgttttcgaatcgaactcaaaattatgaagctatgaataatgaaaatcttcatggctggtttacttctgatggaatgttttacctatacaataacgatttaggacactacagtgaaaactattgggcaacggtaaatccctaccgcttacctggaaccacagaaactgagcaaaaaccactagagggaactcctgagaatattaaaacgaactatcaacaagttggcatgactggtctctctgatgacgcttttgttgcaagtaaaaaacttaataacacaagtgctctagctgctatgaccttcactaattggaataaaagcctcaccctcaataaagggtggtttatcttaggaaacaaaataatctttgttggtagcaatatcaaaaaccaatcatctcacaaggcgtatacaactattgaacaacgaaaagaaaatcaaaagtacccttactgttcttatgttaacaatcaacccgttgacttgaataatcagctagttgattttacaaacactaaaagtattttccttgaaagtgatgatcccgctcaaaatattggttactacttcttcaagccaacaacacttagcataagtaaggcacttcaaacagggaaatggcaaaacataaaagctgatgacaaatcaccagaagccatcaaagaagtttcaaatacctttatcactatcatgcaaaaccatactcaagatggcgatcgttatgcctatatgatgcttccaaatatgactcgtcaagaatttgaaacctatattagcaagcttgatatcgacttattagaaaacaatgacaaactggccgctgtctacgatcatgatagtcaacagatgcacgtcattcactatggaaaaaaagcaacgatgttttcaaatcataatctttctcatcaaggcttttatagttttcctcatcctgtcaggcaaaatcaacaataa

SEQ ID NO: 48 - DNA, 882 bp, Streptococcus pyogenes
ttgctgacctttggaggtgcaagtgcggttaaggcggaagaaaatgaaaaagtaagagagcaagaaaagctcatacagcaactttctgaaaagctagtggaaattaatgacttacaaactttaaatggtgataaagagagtatacagtctctcgtagattatctgactcgaagaggaaaacttgaagaagaatggatggaatatttgaattctggtattcaacgcaaactttttgttggtccaaaaggacctgcaggtgaaaaaggagaacaaggtcctactggaaaacaaggcgagcgtggtgagaccggccctgcaggtccacgtggtgacaagggcgaaactggtgacaaaggagcccagggtccagtaggtcccgctggcaaggacggccaaaacggtaaagatggtcttccaggtaaagacggcaaggacggccaaaacggtaaagatggtcttccaggtaaagacggcaaggacggccaagacggtaaagatggcctcccaggtaaagacggtaaggatggccaaaatggcaaagatggtcttccaggtaaagacggtcaaccaggtaaaccagctcctaaaacaccagaggtccctcaaaacccagatactgcaccacatactccaaaaacccctcggatccctggtcaatcaaaagacgtgacacctgctcctcaaaacccttctaatagaggtctaaacaaaccacaaacacaaggtggtaatcagctcgcaaaaacaccggcagctcacgacacacacagacaattgccagcaacaggcgaaacaaccaatccattctttacagcagctgctgtagctatcatgacgacagctggagttgtagctgttgcaaaacgtcaagaaaacaactaa

SEQ ID NO: 49 - DNA, 972 bp, Streptococcus pyogenes
atgtatatattctcatcgtcaaaaaaagatagtgctaaagaattagttatcttgactcctaatagccaaactattttaacagggactattccagcctttgaggaaaagtatggggttaaagtaagattaatccaaggtgggacgggccaacttattgatcaattaggtcgaaaagataaaccattaaacgctgatattttctttggtggcaattacactcaatttgaaagccataaagatttatttgaatcttatgtttctccgcaggtttctactgtcatttcagattaccaattgcctagtcatcgcgcaaccccatatacgatcaatggcagtgtactgattgttaataacgaattagcaagaggacttcatattaccagttatgaggatttgctacaaccagctttaaaaggcaaaattgcttttgctgatcccaacagttcatcaagtgccttctcacagctgactaatatattgttagctaagggggggtacacaaacgctgacgcttgggcttacatgaagcgcttgttggtcaatatgaattctattagggctacgagttcttcagaagtctatcaatctgtcgctgagggtaagatgattgttgggctaacctacgaagatccttgtatcaacctgcaaaaaagtggtgccaatgtttccattgtttatccaaaagaaggaacggtgtttgtgccctcctctgttgctattatcaaacatgcgccaaacatgacagaggctaagctctttattaattttatgttatcacgtgatgtgcaaaatgcctttggccaatcaaccagtaaccgacccattcgtcaagatgcccaaaccagtcacgacatgaaagccttagaaacgatagctactttgaaagaggattatgcttatgttaccaagcacaagaaaaaaatagtggctacgtacaaccagttgcgccaacggttggaaaaagctaagtag

SEQ ID NO: 50 - DNA, 792 bp, Streptococcus pyogenes
atgccgactagtattaaagctattaaagaaagcttagaggccgttactagcctcttggaccccctctttcaagaattggcaaccgacactaggtcaggcgtccaaaaagctctaaaaagccgacaaaaggttattcaggccgagttagcagaagaagaacgattagaagccatgctttcttatgaaaaagctctttataaaaaaggttataaagccattgcaggtattgatgaggtgggacgtggtcccttagcaggtcccgttgtggcagcttgtgtgattttacctaagtattgtaaaattaaaggccttaatgattctaaaaaaatccctaaagctaagcatgagaccatttatcaggcagtgaaagaaaaggctttggctatcggtatcggtattattgacaatcagcttattgatgaggtcaatatttatgaagcaaccaaactggccatgctagaagccattaaacagttggagggccaactcacacaaccagattatctcttgattgatgccatgacattggatattgctatttcgcagcagtctattcttaaaggcgatgccaattccttgtctattgcagcagcatcaattgtagctaaggtcaccagagatcagatgatggctaactatgatcgcatttttcctggttatgactttgctaaaaatgcaggctatggcaccaaagaacatttacagggattaaaagcttacggcataacgcctatccatcgtaaaagttttgaacctgttaaatccatgtgctgcgattcaactaatccttaa

SEQ ID NO: 51 - DNA, 1566 bp, Streptococcus pyogenes
atgacagttaaggaagaaacgatgagtattttagaagttaagcagttgagtcacggttttggggatcgggctatttttgaaaatgtgtcatttcgcctcttaaaaggcgaacatattggactagttggggcaaatggtgaaggaaaatcaacctttatgagtatagtcacaggacatttacagcctgacgaaggaaaagtagagtggtcgaagtatgtcactgcaggttacctggatcaacatacagtgttggaatcaggacaaaccgttcgtgatgtcttgcgaactgcttttgatgagttatttaagaccgagaatcgtattaatgagatttacgcgtcaatggcagatgataaagctgatattgctgttttgatggaagaagtaggtgagcttcaagatcgtttagaaagtcgtgatttctatactttggatgctaagattgatgaagtagcgcgtgcgcttggtgttatggattttggaatggagtcagatgttacatccttatcaggtgggcaacgaacaaaggttttattagccaaattactattagaaaaacctgatattctgctattagatgaaccaactaaccatttggatgctgagcatattgaatggttaaaacgctatttacaacattatgaaaatgcttttgtgttgatttcgcatgatatttctttcttaaatgatgtgattaatattgtttatcatgttgaaaatcaaagtttagttcgctatactggggattattaccaatttcaagctgtttatgagatgaaacaatctcaacttgaagcagcctatgaacgtcaacaaaaagagattgctaacttgcaggattttgtcaaccgaaataaggctcgggtagcgacacgtaacatggcaatgtctcgccaaaaaaaacttgataagatggatataattgaacttcaagctgagaaaccaaaaccaaattttgaatttaagcaagctagaactcccagtcgattcatttttcaaacaaaaaatcttgtgattggttatgattacccattgaccaaagaacccttaaatataacgtttgaaagaaatcaaaaaattgctattgttggggccaacggtattggaaaatctactttgctaaaaagtttattaggtgttattgagcctttagaaggtcatattgtcacaggggattttttagaagttggctactttgaacaagaagtgacaggtgttaaccgacaaactccgctagaagtagtttgggatgcttttcctgccttaaatcaggcagaagttcgagcggcactagctcgttgcggactaacatcaaaacatatcgaaagtcaaattcaagtactttcgggtggtgaacaagcaaaagttcgtttttgtttgttgatgaatcgtgaaaataacgtgcttattttagacgaaccaacaaatcatcttgatattgatgctaaaaatgagctcaaacgtgctttaaaagcatataagggttctattttaatggtttgtcatgaacctgatttctacaatgggtgggtaaccgatacttgggattttagtaagttaacctaa

SEQ ID NO: 52 - DNA, 1053 bp, Streptococcus pyogenes
atgaacaagaaatttattggtcttggtttagcgtcagtggctgtgctgagtttagctgcttgtggtaatcgtggtgcttctaaaggtggggcatcaggaaaaactgatttaaaagttgcaatggttaccgatactggtggtgtagatgacaaatcattcaaccaatcagcatgggaaggcctgcaatcttggggtaaagaaatgggccttcaaaaaggaacaggtttcgattattttcaatctacaagtgaatctgagtatgcaactaatctcgatacagcagtttcaggagggtatcaactgatttatggtatcggctttgcattgaaagatgctattgctaaagcagctggagataatgaaggagttaagtttgttattatcgatgatattatcgaaggaaaagataatgtagccagtgttacctttgccgaccatgaagctgcttatcttgcaggaattgcagctgcaaaaacaacaaaaacaaaaacagttggtttcgtgggcggtatggaaggaactgtcataactcgatttgaaaaaggttttgaagcaggagttaagtctgttgacgatacaatccaagttaaagttgattatgctggatcatttggtgacgctgcaaaaggaaaaacaatcgcagcagctcagtatgcagcaggtgctgatgttatttaccaggcagcaggaggcactggagcaggtgtatttaatgaagcaaaagctattaatgaaaaacgtagtgaagctgataaagtttgggttattggtgttgaccgtgatcaaaaagacgaaggaaaatacacttctaaagatggcaaagaagcaaactttgtacttgcatcatcaatcaaagaagtcggtaaagctgttcagttaatcaacaagcaagtagcagataaaaaattccctggaggaaaaacaactgtctatggtctaaaagatggcggtgttgaaatcgcaactacaaatgtttcaaaagaagctgttaaagctattaaagaagcgaaagcaaaaattaaatctggtgacattaaagttcctgaaaaatag

SEQ ID NO: 53 - DNA, 867 bp, Streptococcus pyogenes
atgaaaatgaaaaaaaaattctttttgttaagtcttttggccctatcaactttctttttatccgcatgttctagctggattgataaaggtgagtcaataaccgctgtaggatcaacagcactacaacccttagtagaagcagtagctgatgaatttggaagcagtaatctaggcaagactgtcaatgttcaaggtggtggttcaggtacagggttgtctcaagttcaatcaggagctgtccaaattggaaatagtgatgtctttgcggaagaaaaagatggtattgatgcttctaaattagttgatcatcaagtagctgttgcaggacttgcagttattgccaatcctaaagtcaaggtttccaatctcagtagtcagcagttgcaaaagattttttcaggagaatataccaattggaaacaagttggaggagaagatcttgcgatttcagtgatcaaccgagcagcaagttctggctcacgagcaacctttgacagtgttatcatgaaaggggtcaacgctaaacaaagtcaagagcaagactccaatgggatggttaaatcgattgtttcacaaacaccaggtgccatttcttacctttcctttgcctacgttgattcatctgttaaatctttgcaattaaatgggtttaaggcaaatgctaagaacgtggctacaaatgattggccaatctggtcctacgaacacatgtataccaaagataaaccaacagggttgaccaaggaatttcttgattatatgttttcagatgaagtacaacagaacattgttacacatatgggatatatttcgataaatgatatggaagtggtcaaatctcatgatggaaaagtaacaaaaaggtaa

SEQ ID NO: 54 - DNA, 2175 bp, Streptococcus pyogenes
atgacgcacaaaataaaagtattgctgcttgcgataatgtctatttttttgacatgcaatattgcaagtgctgaaactattgctattgtttcagatacagcttatgccccatttgaatttaaagactcagatcaaatttacaaaggaattgacgttgatattattaatgaagtagccaaacgtcaatcttgggatttcagtatgagtttcccgggttttgatgcagctgtaaatgctgttcaatctggtcaagcgagtgctctaatggccggtacaaccattacgaatgctcgtaagaaagtctttcatttctcagagccatattacgataccaaaattgtcattgcgacacgtaaagccaatgccatcaaaaaatacagtgacttaaaaggaaaaacggtcggtgttaaaaatggaacagcggctcaagcctttttgaataactataaaaaaaagtatgattatactgttaaaacatttgacacaggtgatcttatgtataatagtttatctgctggttctattgccgctgttatggatgatgaggcggttatccaatacgcaatcagccaaaaccaagatattgctattaacatgaaaggagagcccattggaagctttgggtttgctgtcaaaaagggaagcggatatgattatctagttaatgatttcaatacagctcttaaagctatgaaagctgatggtacctaccaagctatcatgaccaagtggttaggcacagatgataaagctaccaccagtcaggcaacgggaaatccatctgccaaagctacacctacaaaggacagttataaaattgtctctgattcgtcttttgcaccgtttgaatttcaaaatggtaagggcaaatacgttggtattgacatagaattaatcaaagctattgctaaacaacaaggtttcaaaattgaaatcgctaatccaggtttcgatgctgccttaaatgctgtgcaatctagccaagcagatggggtcattgctggtgcaactattactgacgctcgtaaagctatctttgatttttctgatccttattatacttctaatatcattttagctgttaaagctggaaaaaacatcaagaactatgaagacttagacagaaaaacagtcggtgctaaaaacggcacttcatcttactcttggttaaaagaaaacgctcctaaatatggttataatgtcaaggcatttgatgatggttctagcatgtatgatagcttaaattcaggttctgtagatgctatcatggatgatgaggcggttcttaaatacgctatctctcaaggtcgtcgctttgaaacacctcttgagggcatttctactggtgaagttggttttgctgtcaagaaaggaactaatccagaattaatcgaaatgttcaacaatggcttagctgctctcaaaaaatctggtcagtatgatgacattatagataaataccttgactctaagaaagctgcaactccttctgaaaaaggtgctgatgagtctactatttcaggcctattatcaaataactacaaacaactattggcaggacttggaaccacgctcagtttaacccttatttcatttgctattgctataattatcgggatcatctttgggatgatggccgtgtcaccaactaaatcacttcgacttatttcaacggtctttgtggacgttgttcgagggattcctttgatgattgtggctgccttcattttctggggagtaccaaaccttatcgagagtatgaccggccaccagtcaccgattaatgatttcttagctgctacaattgcactgtcacttaatggcggagcctatattgctgaaattgttcgcggtggtatcgaagctgttccagcagggcaaatggaagctagtcgaagtcttggtttgtcttacggaaccacgatgagaaaagtaattctcccacaagctgtgaaactaatgttacctaactttatcaatcagtttgttatttcattgaaggatacaacaatcgtctcagcaattggtttagtggaactcttccaaacaggtaaaatcattattgctagaaattaccagtcgttccgtatgtatgctattttagcaattatttaccttatcatgattatactcttaacaagacttgcaaaacgtttagaaaagaggcttaactaa

SEQ ID NO: 55 - DNA, 654 bp, Streptococcus pyogenes
atgggaaaagaaataaaagtgaaatgctttttgcgtagatcagcttttggattagttgcggtgtcagcatcagtattagtcggttcaacagtatctgctgttgactcacctatcgaacagcctcgaattattccaaatggcggaaccttaactaatcttcttggcaatgctccagaaaaactggcattacgtaatgaagaaagagccattgatgaattaaaaaaacaagctattgaggataaagaagctacgacagctatagaagcagcaagttcagatgccttagaagcattagcggatcaaacagacgctttacaatcagaagaagctgcggttgttaaagcggataacgctgctagtgacgccttagaagcattggcggatcaaacagacgctttacaatcagaagaagctgaagtagttcaatcagataacgctgctagtgacgcctgggaaaaagcagcaactccaatcgctttagatgttaagaaaactaaagatacaaaacctgtagttaaaaaagaagaaagacaaaacgttaatacccttcctacaactggtgaagagtctaacccattctttacagctgctgcgcttgcaataatggtaagtacaggtgtgttagttgtaagttcaaagtgcaaagaaaattag

SEQ ID NO: 56 - DNA, 2379 bp, Streptococcus pyogenes
atgaaaacgaaaaaagttattattttagttggtctattgttatcatctcagttgactttgatagcttgtcaatcacgaggtaatggtacatatcccattaaaacgaaacaatcacgtaagggaatgacgtcaaacaaaattaaaccgattaaaaaaagcaaaaagacaaacaagactcacaaaggtgtggcgggtgtcgattttcctacagatgatgggtttattttaaccaaagactcaaaaatcttatcaaaaacagatcagggaatcgttgttgaccatgatggtcattcgcattttattttttatgccgatttaaagggaagtccatttgaataccttattccaaaaggagcaagtttagctaagccagctgttgctcagcgagcagctagtcaagggacttctaaagtagcagatcctcatcaccattatgaatttaacccagcggatattgtggctgaagatgctttaggctacacggttcgccacgatgatcacttccattatattttgaagtcaagcttatcaggtcagacacaggcacaagctaaacaggttgctactcgcttgccacaaaccagtagccttgtttcaacagctacagctaatggtattccaggcttgcatttcccaacctcagatggttttcaatttaacggtcaaggtattgttggggtaacaaaagacagtattttagtggaccacgatggtcacttacatcctatttcttttgcggaccttcgtcagggtggctgggcacatgtggcagatcaatacgatcccgctaaaaaagcagaaaagccagcagaaacccatcagacaccagagctatctgaacgtgaaaaggaataccaagaaaaattagcttatttggcagaaaaattggggattgatccatcaactattaaacgtgtggaaacacaagacggtaaacttggtttggaataccctcaccatgaccacgcacacgtattgatgttatctgatattgaaatcggaaaagacattccagatccacatgctattgagcatgcccgtgaattggaaaaacataaggttggaatggataccttgcgtgccttagggtttgatgaagaagtgattttggatatcgttcgcactcacgatgctccaaccccattcccatcaaatgaaaaagatccgaatatgatgaaagaatggttagcaacggttatcaaacttgacttgggcagccgtaaagatcctttgcaacgtaaaggactttcactgttacccaacttagaaactttaggaattggctttacaccaatcaaagatatctcacctgttttgcaatttaaaaaattgaaacagttgttaatgacaaaaacaggggtgactgattatagatttttggataatatgccacagttagaaggcattgatatttcacaaaacaatctcaaagatattagtttcttgagcaaatataaaaacttaactctagtagcggctgctgataatggtattgaagatattaggccgcttggtcaattaccaaatctcaaattcctcgtattgagtaacaataagatttctgatttaagcccactggcatcgttacatcaattgcaagaattgcacattgataataatcagattacagatttaagccctgtttctcataaagaatcattgacggttgttgatttatcaagaaatgctgatgttgacttagcaacacttcaagcacccaaattagaaacgttaatggtcaatgataccaaggtttctcatttggatttcttgaaaaataatcctaatctatctagcctatctattaaccgtgcgcaattgcaatctcttgaaggtattgaagcaagtagcgtcattgtcagagtagaagcagaaggtaaccaaattaaatcgcttgtgcttaaagacaagcaagggtcacttactttcttggatgtgacaggcaaccagttgacttctctagaaggtgttaataattttacagcacttgacattttaagcgtgtctaaaaaccaattaacaaatgtcaacctatctaaacccaataagacagttactaacattgatattagtcataacaatatctcattagcagaccttaaattgaacgagcaacatattccagaagccattgcgaaaaacttcccagcggtttacgaaggttctatggtaggtaatggaacagctgaagaaaaagcagctatggctactaaggcgaaagaaagtgctcaagaagcatcggaatcacatgactacaaccataatcatacctatgaagatgaagaaggtcatgctcacgagcacagagacaaagatgatcacgaccatgaacatgaggatgaaaatgaagctaaagatgagcaaaaccatgctgactaa

SEQ ID NO: 57 - DNA, 1428 bp, Streptococcus pyogenes
ttggcaaaacaatataaaaatttagtgaacggtgaatggaaactatcagaaaacgagattaccatttacgcaccagcaacaggtgaagagttaggatcagttccagcgatgacgcaggcagaggtagatgctgtttacgcttcagctaaaaaggctctatcagattggcgcgctttgtcttatgtggaacgtgcagcttaccttcataaagcggctgatattttagtacgtgatgctgaaaagatcggcgcgattctttcaaaagaagtagccaaaggtcacaaggcagctgtcagtgaagttattcgtaccgctgaaatcattaattatgcagcagaagaagggcttcgtatggaaggtgaagttcttgaaggtggtagcttcgaagctgcaagtaagaagaagattgctattgttcgtcgtgaaccagttggtttagttcttgccatctcaccttttaattatcccgttaacttggcaggttctaaaattgctccagctcttattgcaggaaatgttgttgctcttaaaccaccaacacaaggctctatttctggtttgttactagcagaagcttttgcagaagctggtattccagcaggtgtctttaataccattacagggcgaggttctgttatcggtgattatatcgttgagcacgaagcggttagctttatcaactttacaggttctactccaattggggaaggaatcggtaaattagcgggtatgcgaccaattatgcttgagcttggcggtaaggattctgctatcgttttggaagatgcagatcttgctttagcagcgaaaaatattgtagccggtgcttttggttactcaggccaacgttgtacagcggttaaacgtgttcttgtgatggacaaggtggcggatcaattggcggctgagattaaaacacttgttgaaaaactaagtgtcggaatgcctgaagacgatgctgatattacaccattaattgatacatcagctgctgattttgttgaagggttgattaaagatgcaactgataagggagctactgctttgacagcctttaatcgtgaaggcaatcttatttcacccgttctctttgatcatgtgacaactgacatgcgtttggcatgggaagagccgttcggcccagtattaccaattattcgtgtaaccactgtagaagaagccatcaagatttctaatgagtctgaatatggtttgcaagcttctatttttacaactaatttcccaaaagcttttggcattgctgagcaattagaagttggaactgttcaccttaacaataaaacacaacgtggaacagataatttcccattcttaggcgctaaaaaatcaggtgcaggggtacaaggagttaaatattctatcgaagctatgacaactgttaaatctgttgtatttgatatccagtaa

SEQ ID NO: 58 - DNA, 2160 bp, Streptococcus pyogenes
atgagtctcaaagatcttggcgatatttcatattttcgcctaaataatgaaattaaccgtcctgttaatggtaaaattccacttcataaagacaaagaagctttaaaagctttttccgctgaaaatgtgctgccaaacaccatgtcttttacttccattacggaaaaaattgagtatttaatctcaaatgattacattgaatcagcttttattcagaaataccgccctgaatttattactgaattagatagcataatcaaatcagaaaattttcgctttaaatcatttatggcagcctacaagttctaccagcaatacgccttaaaaacaaatgatggagagcattatttagaaaaccttgaagaccgtgtcttgtttaatgctttgtattttgcagatggtcaagaagacttagcaaaagatttagccgttgaaatgattaaccaacgttaccaaccggctactccttcctttttaaatgctggtcgaagccgtcgtggtgaattggtctcttgtttcttgattcaagtaactgatgacatgaactctatcggacgttctatcaactctgctttgcaattatcccgtattggtggaggagttgggattaccttgtctaacctccgtgaagctggcgcaccaatcaaaggctatgctggtgcagcctcaggagttgttcctgttatgaaattatttgaagatagtttttcttattcaaatcaacttgggcaacgtcaaggagctggtgttgtttacctaaatgtttttcatcctgatatcattgctttcttatctactaaaaaagaaaatgccgatgaaaaggtgcgtgttaaaaccttgtcactagggattaccgttcctgataaattctacgaattagctcgtaaaaacgaggacatgtatctctttagtccttacaatgttgaaaaagaatatggcattccctttaactatctcgacattaccaatatgtacgatgagttagtggcgaaccctaaaattactaagactaaaattaaagctcgtgatcttgaaacagagatttcaaaattacaacaagaatctggttacccttatatcatcaatattgatacagctaataaagctaatcctatcgatggaaaaatcatcatgagcaacttgtgttctgaaattttacaagttcaaacacctagccttatcaatgatgcgcaagagtttgtagaaatgggaactgatatttcatgtaacttaggttccactaatatcctgaacatgatgacctcaccagactttggccgttctattaagaccatgacacgtgccctaacttttgttactgattcatcaagcattgaagctgttccaaccattaaacatggcaatagccaagctcatacttttggccttggagctatgggactacattcttaccttgctcaacatcatattgaatatggcagtccagaatccatcgagtttactgatatttactttatgctcctgaattattggaccttggtcgaatccaataacatcgctcgtgagcgccaaactacctttgttggctttgagaactctaagtacgctaatggtagttactttgataaatacgttacaggacactttgttccaaaatctgatttggtgaaagatctgttcaaagaccattttattccgcaagcttcagattgggaggctcttcgcgacgccgttcaaaaagatggtctttatcatcaaaaccgactagcagttgctccaaatggctctatttcttatatcaatgactgctctgcttctattcacccaatcacacaacgcatcgaagagcgtcaagaaaagaaaattggtaaaatctactatcctgcaaatggtttgtctacggataccattccttactatacatctgcttacgatatggacatgcgcaaagttattgatgtctatgccgctgcgaccgaacatgtggaccaaggcttgtcattaactctattccttcgtagtgagttgcctatggagctttatgagtggaaaacacaaagcaaacaaaccactcgtgatttatccatcttacgaaactacgctttcaataaaggcattaaatctatctactatatccgtacctttacggatgatggggaagaagtgggcgcaaaccaatgtgaatcttgtgtcatttaa

SEQ ID NO: 59 - DNA, 2619 bp, Streptococcus pyogenes
atgaaagaattatcgtctgcacaaatccgccaaatgtggttggatttctggaaatctaaaggacattgcgttgagccttcagctaacttggttcctgtgaacgacccaacgcttctttggatcaactcaggtgttgcaaccttgaaaaaatattttgatggttcagtgattccagaaaatccacgtattaccaatgcacaaaaatcaattcgtactaatgatattgaaaatgttggtaaaacagcacgtcaccatactatgtttgaaatgcttggtaacttctcaattggagactatttccgtgatgaagctattgagtggggatttgaactcttgacaagtccagactggtttgatttccctaaagacaagctctacatgacttattacccagatgacaaggattcgtataaccgttggattgcttgtggcgttgaaccaagtcacttggtgccgatcgaggataacttctgggaaatcggtgctggtccttcaggtccagatacggagattttcttcgaccgtggtgaagatttcgatccagaaaatatcggacttcgcctcttggctgaagatatcgaaaacgatcgttacatcgaaatctggaacatcgttctctcacaattcaatgctgacccagccgtaccacgttcagaatacaaagaattaccaaacaaaaacattgatacaggtgctggtcttgaacgtcttgcagctgttatgcaaggggcaaaaacaaactttgaaactgacctcttcatgccaatcatccgtgaagtagagaagttgtcaggtaaaacttacgatccagatggcgacaacatgagtttcaaggttatcgctgaccacatccgtgcgctttcatttgctatcggtgatggtgcgcttcctggaaatgaaggtcgtggttacgttcttcgtcgtcttctccgtcgtgcggttatgcacggtcgccgtcttggcatcaacgaaactttcctttacaaattggttccgactgttggacaaatcatggaaagctactacccagaagtgcttgaaaaacgtgattttatcgagaaaatcgttaaacgtgaggaagaaacatttgctcgtactatcgatgcaggtagcggtcacttagattcattgcttgcgcagcttaaggctgaaggtaaggatactcttgaaggtaaagatatcttcaaactttatgatacttatggattcccggttgaattgacagaggaattggcagaagatgcaggctacaagattgaccacgaaggctttaagtcagccatgaaagaacaacaagaccgtgcgcgtgcagctgttgttaagggtggttcaatggggatgcaaaatgaaaccctagctggtattgttgaagaatcacgattcgaatacgacacatatagtcttgaatcaagtctttcagtcatcatcgctgataatgaacgtaccgaagctgtttcagaaggtcaagcccttcttgtctttgctcaaacaccattctatgctgaaatgggtggacaggttgctgacacaggtagaatcaaaaatgataagggtgacacagttgctgaggttgttgatgttcaaaaagcaccaaatggtcaacctctacacactgtaaacgttttagcatcactttcagttggaacaaactacacacttgaaatcaacaaagagcgtcgtttggctgttgagaaaaaccacacagctactcacttgctccatgcagctcttcacaatgttatcggtgaacacgcaactcaggctggttcattgaacgaagaagaattcttgcgctttgattttactcactttgaagcagtaagcaatgaggaacttcgtcacattgaacaagaagttaatgagcaaatttggaacgctcttacaatcacaacgactgaaactgacgttgaaaccgcaaaagagatgggagcaatggcgctttttggtgagaaatatggtaaagtggttcgtgtggttcaaattggtaattattctgttgaactttgtggtggaactcacttaaataattcttcagaaatcggtctcttcaagattgtcaaagaagaaggtattggttcaggcactcgtcgtattattgcagttactggtagacaagcttttgaagcttatcgtaaccaagaggatgccctaaaagagatcgctgctactgtaaaagctccgcaattgaaagatgcagcagctaaagtacaagctcttagcgactcgcttcgtgatcttcaaaaagaaaatgcagaacttaaagaaaaagcagcagctgcagcagctggtgatgtctttaaagatgttcaagaagctaagggcgtgcgcttcattgctagtcaagttgatgttgcagatgcaggggcacttcgtacatttgctgataactggaaacaaaaagactactctgatgtgcttgttctcgtagcagctattggtgagaaggttaatgtccttgttgcaagcaaaaccaaagatgtccacgctggtaacatgatcaaagaattggcaccaattgtagcaggtcgtggtggaggtaaaccagacatggctatggcaggtggtagcgatgcaagtaaaattgcagagctgctagcagcagttgctgaaatagtgtaa

SEQ ID NO: 60 - DNA, 1056 bp, Streptococcus pyogenes
atgaaaaactcaaataaactcattgctagtgttgtgacattggcctcagtgatggctttagcagcttgtcaatcaactaatgacaatactaaggttatttcgatgaaaggtgatacaattagcgttagtgatttttacaatgaaacaaaaaacacagaagtatcgcaaaaagcgatgctaaatctggtaattagtcgtgtttttgaagctcaatatggtgataaggtttcaaaaaaagaagttgaaaaggcgtatcataaaacagctgaacagtatggcgcttcattctctgctgctttggcacaatcaagcttgacacctgagacttttaagcgtcagatccgctcttcaaaattagtagaatatgcggttaaagaagcagctaaaaaagaattgacaacacaagaatataagaaagcatatgaatcttatactccaacaatggcagtcgaaatgattactttagataatgaagagacagctaaatcagtcttagaggaactaaaagccgaaggcgcagactttacagctattgctaaagaaaaaacaacaacacctgagaaaaaagtgacctataaatttgattcaggtgcgacaaatgtaccgactgatgtcgtaaaagcggcttcaagtttgaatgagggtggcatatcagacgttatctcggttttagatccaacttcttatcaaaagaagttttacattgttaaggtgactaaaaaagcagaaaaaaaatcagattggcaagaatataagaaacgtttgaaagctatcattatagctgaaaaatcaaaagatatgaatttccaaaacaaggttattgcaaatgcattggataaagctaatgtaaaaattaaagacaaagcttttgctaatattttggcgcaatatgcaaatcttggtcaaaaaactaaagctgcaagtgaaagttcaacaaccagcgaatcatcaaaagctgcagaagagaacccatcagaatcagagcaaacacagacatcatcagctgaagaaccaactgagactgaggctcagacgcaagagccagctgcacaataa

SEQ ID NO: 61 - DNA, 597 bp, Streptococcus pyogenes
gtgctttatccaacacccattgcaaagttaattgacagttactctaaacttccaggaattggtatcaagacggcgacgagattagccttttatactattggaatgtcaaatgaagatgtcaatgattttgctaaaaacttattagcagctaaaagagaactgacctattgttcgatttgtggaaaccttaccgatgacgatccttgtcacatttgcacagacacgagtcgtgatcagacgaccattctggtagtagaagatgctaaagatgtttctgccatggaaaaaatccaagagtatcatggctattatcatgtgcttcacggcttgatttcgcctatgaatggtgtggggccagatgacatcaaccttaaaagtttaattacccgtctaatggatggtaaggtgagcgaagttatcgtagctaccaatgccacagcagatggggaagcaacgtccatgtatatttcacgtgtcttgaaaccagccgggattaaggtaactcgtttggcaagaggtctcgcagtaggttcagatattgagtatgctgatgaagtaacattattgagagctattgagaatcgtactgaactttaa

SEQ ID NO: 62 - DNA, 807 bp, Streptococcus pyogenes
atggatatgtctaaatcaaatcgtcgtacttggcaaggtttagttgttattttaatagctattctcaccacttttaccacaagtactgttacggcagccagaaaaattagaaatttccctgataccacggaaattttgttaggaacgaaggcgactgagacaccaggaatcttaccattcactggtagctaccaattagttttgggcgatcttgacaatctgcaaaggccaaccttcgcacacatccagctaaaagatcaagatgagcctaatattaaacgaaaaggacttaaattcaatcctcctggctggcataattacaaattgactgacgctaatggaaaaacaacttggttaatggaccgtggccatttagttggttaccaatttagcggcttaaatgacgagcctaaaaacctagttacaatgacaaaatatcttaatactggctttagtgacaaaaatcctttaggaatgctctattatgaaaatagattagatagctggttagctctacaccctaacttctggctagactataaagttactcctgtttatcataaaaatgagttagttcctcgccaagtagttctacagtatgttggaattgatgaaaatggagatctacttcaaattaagttaggtagtgaaaaagaaagtgtagacaactttggagtaacatcagttacattagataacgtatctcctttagctgaattggattaccaaacaggaatgatgctagattcaactcaaaacgaagaagatagtaatttagaaaccgaagagtttgaagaagcggcttaa

SEQ ID NO: 63 - DNA, 942 bp, Streptococcus pyogenes
atgactagtaaaaaagcgtgtttatcaagcatcattgtgttagcaagtttaacgtgtggaaatgatactgttagtgccaatcatctctcagcaactggagataagtttgatgattgctcaacacttgttgaaaaagatgtggcccctaaagatgaacttgagatgttagcatggtcctcgtctcaaacaactgatgatgctgacagagactatgaagattttctcgatgatgattcttttatttctcaaaatgaaactgataagatgtttgagaatttaactgatgataggttattaaatgaattagatgaattagatgaagaaaatgaagaagatgaagaagatacaattgagccagagcaaaatgtaataatgcctagtgacgatgagctatttgatttaactgatgctgttgagacacgccttactgtttctagtgctccccatttagaggctgaattgccgaaaccacatttgaggagcctatcagatacagcactgcggtctggtgaaattagaggacatttagataacaaactggacgctttgtctgtaacagctacaaagttagcattaacgatggctcaaaaatttgatttgacaacgcatgtctattctataggtgaaagctttagtgaagtattagctgctcattatgaagacagaaaagcagaatcagctttttctaagaaaaagagatttcaccttcctattgctactccagatgttgttatagaggagttaaggcgcctagtctcttctattggaagttcaaaagaagatgtttcagttccttatagtcggaagctaggtatggcagttgcaaaaagaaaaatagccctgccacaaacgggagagaggttctcttattatccagttttacttggtttaatgatattaggattaacgccgattatgataccaaagaagataaataattag

SEQ ID NO: 64 - DNA, 1149 bp, Streptococcus pyogenes
atggcaaaagataaagagaaacaaagtgatgacaagctcgttttgacagagtggcaaaagcgtaacattgaatttttaaagaaaaagaagcagcaagctgaggaagaaaaaaaactcaaagagaaattattgagtgataaaaaagcgcagcagcaagctcaaaatgcttctgaagcggttgagcttaaaactgatgagaaaactgatagtcaggaaattgagtcagaaacgacgtcaaaacctaaaaaaaccaaaaaagttagacaacccaaggaaaaaagcgcgacacaaatcgcttttcaaaaatccttgcctgttcttttgggggcgctcttactcatggcggtgtctatttttatgatcactccttatagcaaaaagaaagagttttctgtaagaggaaaccatcaaacgaaccttgacgaattaatcaaagctagcaaagtcaaagcatctgactattggttaacgctgttaacttcgcctggtcagtatgaacgaccgattcttcgtactattccatgggtgaaatctgtacatctctcttaccaatttcctaatcactttctatttaacgttattgaatttgaaatcatcgcttatgcacaagttgaaaacggttttcagcctattttggagaatggaaaacgtgtggacaaggtcagggcatcagaactaccgaaatctttcttgattcttaatttaaaagatgagaaagcgatccaacagttagttaagcaattaacgacattacctaaaaaattagtcaagaatatcaagtcagtgtctcttgcaaattccaaaacgacagcggatttactacttattgaaatgcatgacggtaatgtagttagagtaccgcagtcacaactcacattgaaacttccctattatcaaaaattgaaaaaaaaccttgaaaatgatagtatagtggatatggaagtgggaatttatactacaacacaggagattgaaaatcaacctgaagttcctcttacgcctgaacaaaacgcagctgataaagaaggagataagcctggtgaacatcaggaacagacagacaatgattcagaaacgccagcaaatcagagtagtcctcagcaaacaccaccatccccagaaacggtcctcgaacaggcccatggctag

SEQ ID NO: 65 - DNA, 1038 bp, Streptococcus pyogenes
atgaaaagacttaaaaaaatcaaatggtggttagtgggtctgctagctttaatctctttgttgctagcgttattttttccgctaccttattatattgaaatgcctggaggcgcttacgatattcggactgtcttacaagtcaatggcaaagaagacaaacgaaaaggagcttaccagtttgttgcagtgggcattagtcgtgccagcctcgctcagctattatatgcttggctgacaccgtttactgaaattagtacagcagaagatacaacaggcggatacagcgatgctgatttccttcgaattaatcaattttacatggaaacatcacaaaatgcagctatttatcaagctttatccttagctggaaaaccagttacattagattataaaggcgtatatgttttagacgtaaacaacgaatctacttttaaaggaacgctacacttagcagatactgtaacaggtgtaaatggtaaacagtttactagttcagcagaacttattgactatgtttctcacctaaaactaggggatgaagttacggttcagtttacgagtgataataagcctaaaaaaggagttggccgtattatcaaactgaaaaatgggaaaaatgggattggcattgccttgactgatcatacaagtgtcaattcagaagacacagtgatctttagtactaaaggagtaggaggacctagtgctggtctaatgtttactcttgatatatatgatcaaataactaaagaagatttacgcaagggccgtacaattgcaggtacaggaactattggcaaggatggcgaagtaggagatattggtggtgcaggtcttaaagtagttgcagcagctgaagctggtgcagatatattttttgttccgaataatcctgttgataaggaaattaaaaaagttaatccaaatgctataagtaattacgaagaagccaaacgggcagccaaacgactaaagaccaaaatgaagattgttcctgttacgactgttcaagaggcactggtttatcttcgcaaataa

SEQ ID NO: 66 - DNA, 849 bp, Streptococcus pyogenes
atgttggaacacaaaattgattttatggtaactcttgaagtgaaagaagcaaatgcaaatggtgatcccttaaatggaaacatgcctcgtacagatgccaaaggatatggtgtgatgagtgatgtctccattaaacgtaagattcgtaatcgtttgcaagatatggggaagtctatttttgtgcaagctaatgagcgtattgaagatgattttcgttcactggaaaaacgcttttcgcaacattttacagctaagacacctgacaaagaaattgaagaaaaagcaaatgcattatggtttgatgttcgtgcttttggacaagtttttacttatctgaaaaaatcaattggggtgcgtggaccagtttccatcagtatggctaagtccttggagccaattgtcatttccagccttcaaattacgcgtagtaccaatggtatggaagctaagaataatagtggccgctcttctgatacgatggggacaaaacattttgtagattatggtgtgtatgtacttaaaggttctatcaatgcttattttgctgaaaagactggtttttctcaggaagatgctgaggctattaaagaagttttggttagcttgtttgaaaatgatgcgtcgtctgcacgtccggaaggctctatgcgagtttgtgaagtcttttggtttacgcattcaagcaaattgggaaatgtttcaagtgcgcgtgtctttgacttgttagagtatcatcaatcaatagaagaaaaaagcacttatgacgcttatcagattcatctaaatcaagaaaaattggctaaatatgaagcgaaagggttaacgcttgaaatcctagaaggactctag

SEQ ID NO: 67 - DNA, 2706 bp, Streptococcus pyogenes
atggcaactaaaaaagtacatattatttcacacagtcactgggatcgcgagtggtacatggcttacgaacaacaccacatgcgtctgattaacttaatagatgacctgttagaagtttttcaaacggatcctgattttcatagttttcatttggatgggcaaaccattatcctagatgattatttaaaagtacgccccgaacgagaacctgagattagacaagccattgcttcgggaaaactccgtatcggacctttctatatcttacaggacgattttttgaccagcagtgaatccaatgtgcgcaatatgctgattggtaaggaagattgtgacagatggggcgctagtgtgccacttggttattttcctgatacctttggaaatatgggacaaacaccacagctgatgttaaaagccggcctacaagctgctgcctttggtcgtggcattcgtccaactggatttaacaatcaggtggataccagtgaaaaatacagctcccaattctctgaaatcagttggcaaggcccagataacagtcgtattcttggactcctcttcgccaactggtacagcaatggcaatgagatcccgacaacagaagctgaggcgcgtcttttttgggataaaaaacttgctgatgccgaacgcttcgcctcaaccaagcaccttctgatgatgaacgggtgtgatcatcaacccgtacaacttgatgtcaccaaggcaatcgccttagccaaccaactctatcctgactacgaatttgtgcattcctgctttgaagattacttggctgatctcgcagatgatttaccagagaacctttcaaccgtccaaggagagattaccagtcaagaaaccgatggctggtataccctagctaacacggcttctgctcgtatttacctcaaacaggctaataccagagtctctcgccaactcgaaaacatcaccgaacccttagcagcaatggcttatgaggtaacaagtacctaccctcacgaccaactgcgttacgcttggaaaaccctcatgcaaaatcaccctcatgattctatctgtggttgtagtgttgatagcgttcatcgggaaatgatgacgcgctttgaaaaagcctatgaagtcggacactatttagcaaaagaagctgctaagcaaattgctgacgccattgataccagggattttccaatggatagccaacccttcgtcttatttaataccagcggccattccaaaacaagtgttgctgagctcagcctgacctggaaaaaatatcattttggccaacgctttcctaaagaggtttaccaagaagctcaagaatatttggcaagactctcccaatctttccaaattattgacactagtggacaagtgagacccgaagcagaaattttaggcacaagcatcgcttttgactacgatttgcccaagagatccttccgcgaaccttatttcgccatcaaagtgagattacggctaccaataactctcccagccatgtcttggaaaaccttagcattaaagctaggaaatgaaacaactccttcagaaaccgtttccctctacgatgacagtaatcagtgccttgaaaatgggtttctaaaagttatgatacaaaccgatggtcgtctaaccatcaccgataaacaatctggactaatctatcaagacctgttgcggtttgaagattgtggcgatattggaaatgaatatatttctcgccagccaaatcatgaccaacctttctatgcggatcaagggaccatcaagcttaacatcattagcaacaccgctcaagttgctgaacttgaaatccagcaaacctttgccattcctatctccgcagataagctcttacaggctgagatggaggctgtcattgacatcacagaacgccaagcaagacgttcacaagaaaaggctgagctaaccttaacaacccttatccgcatggagaaaaataatcctcgcctccaattcaccacacgttttgataaccaaatgactaatcatcgcttgcgcgtcctattcccaacgcaccttaaaacagaccatcatctagctgacagtatttttgaaactgtcaaacgtccaaatcatccagatgccaccttttggaagaatccaagtaacccacagcaccaagaatgctttgtgagtctctttgatggtgaaaatggagtcactattggtaactatggcctcaacgaatatgagatcttaccagataccaacaccattgccatcactctcttacgttctgttggcgaaatgggcgactggggttacttcccaacacctgaagcccagtgtcttggcaaacacagcctttcttatagttttgaaagcatcactaagcaaacacaatttgccagctactggcgagctcaagaaggccaagtccctgttattaccacacaaacaaaccaacacgagggaacattagccgcagaatatagctatttgacgggtacaaacgaccaagttgccctcacagctttcaaacgtcgcttagcagacaatgcccttatcacgcgcagctataatctctcaaacgataaaacttgtgactttagcctaagcctgccaaactacaatgccaaggtcactaatttgttagaaaaagacagcaagcaaagcacacccagccaacttggcaaagcggaaattttaactctagcttggaagaaacaataa

SEQ ID NO: 68 - DNA, 777 bp, Streptococcus pyogenes
atgaaaatcactaaaattgaaaagaaaaaacgcctctaccttatcgaattggataatgacgaatccctttatgtaacagaagatactattgttcggtttatgttgagtaaagataaagtccttgacaatgatcagcttgaagacatgaaacattttgcccaactgtcctacggcaaaaatttagccctttattttctttcctttcaacaacgcagcaacaagcaagttgctgattacctgcgcaagcatgagattgaagaacacattattgctgacatcatcactcaactccaagaagaacaatggatagacgacaccaaattggctgatacctacattcgccaaaatcagttaaatggtgataaaggtccccaagtcttaaaacaaaaattattacaaaaaggcattgcaagtcatgacattgatcctatcttatctcaaactgactttagccaactcgctcaaaaagtaagccaaaaactctttgacaaatatcaagaaaaattgccaccaaaagccttgaaagataaaatcacccaagcattactgaccaaaggcttttcatacgatctagctaaacatagcctcaatcaccttaattttgaccaagataatcaagaaatagaagatcttcttgacaaagaattagacaaacaatatcgtaaactcagtcgcaaatatgatggttataccttaaagcaaaagctctatcaggctctctaccgaaaaggctacaacagcgacgacattaattgcaagttaagaaattatttatag

SEQ ID NO: 69 - DNA, 666 bp, Streptococcus pyogenes
atgatctgtctactatgtcaacaaattagtcaaacaccaataagtattacagaaatcatctttttaagacgtatctcttcaccgatttgtcaacaatgtcaaaaaagctttcaaaagataggaaaaagtgtttgtgcgacatgttgtgcaaactcagatataatagcttgtcgagattgtctaaaatgggaaaacaaaggatacaatgtaaatcatagaagcttatattgttataatgctgctatgaaagcatacttcagtcaatataagtttcaaggagactatttattaagaaaagtttttgcagtagaacttgccgatgttatcaccaagtactataaaggctatatcccagtcccggttcctgtaagtcccggttgttttcgagaaagacaatttaatcaagtgagcgctattcttgaggcagctaatgttagctacctttctctttttgaaaagctagataatactcaccaatcttccagaacaaaaaaagagagattattagtagaaaaatcttatcgactactaaaagtatcaaacattcctgataaaatccttatagtagatgatatttatactactggtagtacaattatcgctcttagaaaacaattggctaaagtagcaaatagtgacattaaaagtttgtcaattgcacgttaa

SEQ ID NO: 70 - DNA, 1014 bp, Streptococcus pyogenes
atgaaatccttttctcttactttttcatttctaaaccttttgaagtatggtacaattaaagttatgacaaaagaatttcatcacgtgaccgtactccttcacgaaacagtggacatgcttgacataaagcctgatgggatttatgttgatgcgacgctaggtggctcaggccactcagcttatttgttgtccaaacttggtgaagaagggcacctctattgttttgaccaagaccaaaaggctattgacaatgcacaagttaccctcaaatcttatattgacaaaggacaggtaacttttattaaagataattttagacacctcaaagcacgtttaacagcgcttggagttgatgaaattgatggtatcttatatgaccttggtgtttccagcccgcaattggatgaaagagaacgagggttttcttataaacaagatgctccattggatatgcgcatggatcgtcagtcgctcttaacagcttacgaagtggtgaatacctatccattcaatgatttggttaagatttttttcaaatatggtgaagataaattctccaagcagatcgctcgaaaaattgaacaagcaagagctattaagcctattgagacaacaacagagttggcagaattgattaaggcagcaaagccagctaaagagttgaagaaaaaaggccaccctgctaaacagatttttcaagctattcgcattgaagtcaatgatgaattgggagcggccgatgaatctattcaggacgctatggaattattagcccttgatggtcgtatctcagttattaccttccattctctggaagatcgcctaaccaagcagttgtttaaagaagctagtacggtggatgtgccaaaagggcttcctctaattcctgaagatatgaaacctaagtttgaacttgtttcacgtaagccgatcttacctagtcattcagagttaacagctaataaaagggcacactcagccaagctacgtgttgccaaaaaaattcggaaataa

SEQ ID NO: 71 - DNA, 792 bp, Streptococcus pyogenes
gtgacaacgacggaacaagaacttaccttgactcccttacgtgggaaaagtggcaaagcttataaaggcacttatccaaatggggaatgtgtctttataaaattaaatacgacccctattctacctgccttagcaaaagaacagattgcgccacagttactttgggccaaacgcatgggcaatggtgatatgatgagtgcccaagaatggcttaacggccgtacattgaccaaagaagatatgaacagtaagcaaatcattcatattctattgcgccttcacaaatctaaaaaattagtcaatcaactgcttcagctcaattataagattgaaaacccatacgatttattggttgattttgagcaaaatgcacccttgcaaattcagcaaaattcatacttacaagctatcgttaaagaattaaaacggagcttaccagagttcaaatcagaagtagcaacgattgtgcatggagatattaaacatagcaattgggtgattactactagtggtatgatttttttagtagattgggattctgttcgtctaactgatcggatgtatgatgttgcttacctgttgagccactatattccacggtctcgttggtcagaatggctgtcttattatggctataaaaataatgacaaggttatgcaaaaaattatttggtatggtcaattttctcacctgacacaaattctcaagtgttttgacaagcgtgacatggagcatgtgaatcaggagatttatgccctcagaaaatttagagaaatatttagaaagaaataa

SEQ ID NO: 72 - DNA, 2016 bp, Streptococcus pyogenes
atgatattaacagctcctatgtccaacttaaagggatttggaccaaaatcagcagaaaaatttcagaaattagatatttatacagtagaagatttactgctttattatccgtttcgctatgaagattttaaatcaaaatctgtttttgatttagtggatggtgaaaaagcagtcattacaggcttagtcgttactccagctaatgtacaatattatggttttaaacgtaaccgtttaagtttcaaattgcgtcaaggggaagctgtcttaaatgttagtttttttaatcaaccctatttagctgataaaatagaacttggtcaagaggtagctgtttttggtaaatgggatgccactaaatcggctattactgggatgaaggttttagctcaagttgaagatgacatgcaacctgtttatcgcgtagctcagggaatttcacagtctactttgattaaagctattaagtcagcttttgaaatcgatgcgcatttggaattgaaggaaaatttaccagctactttattggaaaaataccgattgatgggtcgtagtcaggcttgtttagctatgcatttcccaaaagatatcacagagtataagcaagcgctccgtcggattaaatttgaagaattattttactttcaaatgaaccttcaagttttgaaagccgaaaataaatctgaaacaaatggtttgcctattctttatagtaaacgtgctatggagacaaagatttcctctttaccttttattctaacgaatgctcaaaagcgctctttagatgacatattatctgatatgtcatcgggagctcatatgaatcgtttattgcaaggagatgtaggatcaggaaagacagtcattgctggtctatcaatgtatgcagcttatacagcaggttttcaatcggctttgatggttccaacggaaatcctagctgaacaacactacattagtctgcaagagttatttccagatttatcaatcgctatattaacttcgggtatgaaagcagctgtcaagcgtacggttttagcagctattgcaaatggctcggttgatatgattgtaggaactcatgctcttatccaagactcggtacagtaccataaactggggcttgtcattacagacgagcaacatcgttttggtgttaaacagcgtagaattttccgtgaaaagggagaaaatcctgatgttttaatgatgacagccaccccaattccccgaactctagcaatcacagcttttggagaaatggatgtttctattattgatgaattacctgccggtcgtaaacctattatgacacgctgggtgaaacacgagcagctaggtactgtgttggaatgggtaaaaggtgaattgcaaaaagatgctcaagtgtatgtcatttcaccgttgattgaagaatcagaagctttagatttaaagaatgcagtagcattgcatgctgaattatctacttattttgaaggaattgctaaggttgctcttgtacatggacgtatgaaaaatgatgaaaaagatgctataatgcaagatttcaaggataaaaaaagtcatattttagtatccacaacagttattgaagtaggggtaaatgtcccaaatgcaacgatcatgattattatggatgccgatcgttttggattaagtcagttacatcaacttcgtgggcgtgttggtcgtggatataaacaatcatacgctgttttagtggctaatcccaaaactgattcggggaaaaaacgaatgacaatcatgacagaaacgacagatggtttcgttttagctgagtcggatttaaaaatgcgtggttctggtgaaatctttggtactcgtcagtctggaattccagaatttcaagtagctgatatcgttgaggattatcctattttagaagaagcacgcaaagtttctgcagcgattgtttctgatcctaactggatatatgaaaaacagtggcaattagtggcacaaaatattagaaaaaaagaagtttatgattaa

SEQ ID NO: 73 - DNA, 3828 bp, Streptococcus pyogenes
atgaaaaaaatcagcaaatgtgcgtttgtggcaatatctgcccttgttctcattcaggctactcaaactgtaaaatcacaagagcctttagttcagtcacaactcgtgacaacagtagctttaactcaggataatcgacttttagttgaagagataggcccttacgctagtcaatcagctggaaaagagtattataaacatattgaaaagattattgttgataatgatgtctatgaaaaaagcctggagggcgagcgaacctttgatattaactaccaagggattaagatcaatgctgaccttattaaagacggtaagcatgaattgactattgttaataaaaaagatggtgatatcctaattacctttattaaaaagggcgataaagtgacctttatttcagctcaaaaattaggaacaacagatcatcaggattcattaaaaaaagatgtgctcagtgataaaacagtgccacaaaaccaaggcacacaaaaagttgttaaatctgggaaaaatactgctaacttgtcattaataacaaaattgagtcaagaagatggtgcaattttatttccagaaattgatcgttattctgataacaaacagataaaagcattgactcagcaaatcacaaaggttacagtcaatggtacagtttataaagatcttatttcagattctgtaaaagatactaatggctgggtctcgaatatgacagggcttcatcttggaacaaaagctttcaaagatggagaaaatacaatcgtgatatcctcaaaaggatttgaagacgttactattaccgttaccaagaaagatggtcaaatccattttgtatctgccaaacaaaaacaacatgtgactgctgaagacagacaatcaacaaagttggatgtcaccactttggaaaaagctatcaaagaagcggatgcgattattgctaaagaaagcaacaaagacgcggtcaaagatctggctgagaaacttcaagtcatcaaggattcttacaaagaaatcaaagatagtaagctactcgccgatactcatcgactgttaaaagataccatcgagtcttatcaagcaggtgaggtttctattaacaatctcacagaaggaacctatacgctaaactttaaagctaataaagaaaactcagaagagtcctccatgcttcaaggtgcttttgataaaagagccaaattagtggttaaagcagatggtacaatggaaatttccatgcttaatactgctttgggacaatttttgattgacttttctattgaaagcaaagggacctacccagcagcagtgcgtaaacaagttggccaaaaagatatcaatggtagctatattcgaagcgaatttaccatgcctattgatgatttggataaattacacaaaggtgctgttttggtatcagccatgggaggtcaagaaagtgatttaaaccactatgacaaatacaccaaacttgacatgacctttagtaagaccgttaccaaaggctggagtggttatcaggtagaaactgatgataaagaaaaaggggttgggactgaacgtcttgaaaaagttttagttaaacttggcaaagatttagacggcgatggtaaattatcaaaaacggaattagaacagattcgaggcgagttgcgtctagaccattacgagttaactgatatttctttattgaaacatgctaaaaatattacagaactacatctggatggaaaccaaattacggaaattccaaaagagttatttagtcaaatgaagcaacttcgatttcttaacttaagaagtaatcatttaacttatctagacaaagatacatttaaaagcaatgctcaattaagagaactctacttatcaagtaactttattcactctcttgaaggaggactattccagtcgcttcatcacctggagcaacttgatctttccaagaatcgtattggccgactttgtgataacccatttgaaggattgtctcgtctgacttcattaggtttcgcagaaaatagtcttgaggagatacctgaaaaagcgctagagcctctaacatcacttaattttatcgacttatctcaaaataatttagcactactgccaaaaacaatagaaaaattgcgcgccttaagcactattgtggcaagtagaaatcatattactcgtattgataatatttcatttaaaaatcttcctaaattatctgtactcgatttatcaactaatgaaatttcaaatcttccaaatggtatatttaaacagaataaccaattaacaaaacttgattttttcaataacttgcttactcaggttgaagaatcagtatttccagatgttgaaacgcttaatttagatgtgaagttcaatcagataaaaagtgtgagtccaaaagtaagagctcttatcggacaacacaaactgactccacaaaaacatattgcaaaacttgaagcttccttagatggcgaaaaaataaaatatcatcaagctttcagtcttttagatttgtattattgggagcaaaaaacaaattctgccattgataaagaactagtgtctgttgaagaatatcaacaattgttacaagaaaaaggttcagatacggtttctttacttaatgatatgcaagtcgattggagtattgtgattcagttgcaaaaaaaagcttccaatggacagtatgtgacggttgacgaaaagcttctctcaaatgatccgaaagatgacttaacgggagagttttctttaaaagatccaggtacatatcggattcgcaaagctttaataacaaagaaatttgctactcaaaaagaacatatctatttgacatctaatgatatccttgtggcgaaaggaccacattcacatcagaaagatttagttgagaacggccttagagcattaaatcaaaaacaattgcgtgatggtatttactatttaaatgccagcatgttaaaaactgacttagcatctgagtccatgtcaaacaaggctattaatcatcgagtgactttggtagttaaaaaaggtgtttcctatttagaagttgagtttagaggtataaaggttggtaaaatgttaggctaccttggtgaattgagctatttcgtagatggttaccaaagagatttagctggtaaaccagttggtcgaacaaaaaaggcagaggttgtgtcttatttcacggatgtaactggcctaccattggcagatcgttatggaaaaaactatccaaaagtgctgcgtatgaaattgattgaacaagcgaagaaagacggacttgtgccattacaggtctttgtgcctatcatggatgccatttcaaaagggtctggccttcaaaccgtttttatgcgtttagactgggcaagccttacaacagagaaggcaaaggttgtcaaagaaactaataatccacaagaaaatagccatctaacttcaacagatcagttgaaaggacctcaaaatcgtcaacaagaaaaaacacctacaagtcctccttcagcagctactggtattgctaacttaactgatctcctggctaaaaaagcaaccggccaatcaactcaagaaacttctaagacagatgatactgataaggcagagaaattgaagcagttagtgcgtgaccatcaaacatcaattgaaggtaaaacagcaaaagatactaagactaaaaaatctgataagaaacatcgttccaatcaacaatcaaatggtgaagaaagtagctctcgttatcacttaattgcaggtctatctagctttatgatcgtagctctgggattcattattggtcgaaagacattatttaaataa

SEQ ID NO: 74 - DNA, 1512 bp, Streptococcus pyogenes
atgaataaaaacaaactattaagagttgccatgctactaagtctcttagccccgacagcagaaagcatgacagtgctggctcaagatgtaatgcttgagacgcataaagcaactacaaatgaaaccagtgattcttcttcaaaagaggaaaataataaaaatgcagcacctacaacatcagataaaactgaccaaggtccccttgatgcttctgcagaaacaaactctaatagtcttgttaacgcggatgataaaaaaagaagcgattctagtcagtctgctataggctcttcggacaacaaggcagaagcagaaaaccaggtagatgataaatcaactgatcattcgaaatcaactgatcattcgaaaccaactgaccagcccaaaccatcaccatctaaagttgatacggcacctgcttcttcattgtcgaaacaactgccagaggcaagaactcctattcagtcgttgtccccttacgtatcagatttagatttgagtgagatagatatcccttctgtcaacacatacgcggcatatgtagagcattggagtggtaaaaatgcctatacccaccatcttttatctcgccgttatggtattaaagctgaccagattgatagttacttaaaatcaacaggcattgcctatgacagcacacgtattaatggtgagaagctattgcaatgggaaaagaaaagtgggctggatgttcgagctatcgtagctattgcgatgtctgagagttctttaggaactcaagggattgcaactttgcttggagctaatatgtttggctatgcagcttttgatctagatccgactcaagcaagtaagtttaatgatgatagtgctattgtcaaaatgacacaagacaccattattaaaaacaaaaatagcaattttgcacttcaagatttaaaagcggctaagttttcacgaggtcaattaaactttgcaagtgacgggggtgtttattttactgatactactggtagtggtaaacgtcgcgcacaaattatggaagacctggataagtggattgatgaccatggtggcacaccagccattccagccgaattgaaagtgcagtcatcagctagttttgcatctgtgccagcaggttataagctctctaagagttatgatgtcttgggttatcaagcttcgagttatgcttggggacaatgcacttggtatgtgtataatcgcgccaaagaattgggttaccaatttgatccttttatgggaaatggtggagattggaagtataaagtagggtatgccctttcaaagactccaaaagtaggttatgctatttcatttgcaccagggcaagcgggcgctgatggcacttatggccacgtatcaattgtagaagatgttagaaaagatgggtctattcttatttcagagtctaactgtatcggcttaggtaagatttcttatcgtacctttacagctcagcaggctgaacagctaacatatgttattggcaagagtaaaaactaa

SEQ ID NO: 75 - DNA, 2988 bp, Streptococcus pyogenes
atggataaacatttgttggtaaaaagaacactagggtgtgtttgtgctgcaacgttgatgggagctgccttagcgacccaccatgattcactcaatactgtaaaagcggaggagaagactgttcaggttcagaaaggattaccttctatcgatagcttgcattatctgtcagagaatagcaaaaaagaatttaaagaagaactctcaaaagcggggcaagaatctcaaaaggtcaaagagatattagcaaaagctcagcaggcagataaacaagctcaagaacttgccaaaatgaaaattcctgagaaaataccgatgaaaccgttacatggttctctctacggtggttactttagaacttggcatgacaaaacatcagatccaacagaaaaagacaaagttaactcgatgggagagcttcctaaagaagtagatctagcctttattttccacgattggacaaaagattatagccttttttggaaagaattggccaccaaacatgtgccaaagttaaacaagcaagggacacgtgtcattcgtaccattccatggcgtttcctagctgggggtgataacagtggtattgcagaagataccagtaaatacccaaatacaccagagggaaataaagctttagccaaagctattgttgatgaatatgtttataaatacaaccttgatggcttagatgtggatgttgaacatgatagtattccaaaagttgacaaaaaagaagatacagcaggcgtagaacgctctattcaagtgtttgaagaaattgggaaattaattggaccaaaaggtgttgataaatcgcggttatttattatggatagcacctacatggctgataaaaacccattgattgagcgaggagctccttatattaatttattactggtacaggtctatggttcacaaggagagaaaggtggttgggagcctgtttctaatcgacctgaaaaaacaatggaagaacgatggcaaggttatagcaagtatattcgtcctgaacaatacatgattggtttttctttctatgaggaaaatgctcaagaagggaatctttggtatgatattaattctcgcaaggacgaggacaaagcaaatggaattaacactgacataactggaacgcgtgccgaacggtatgcaaggtggcaacctaagacaggtggggttaagggaggtatcttctcctacgctattgaccgagatggtgtagctcatcaacctaaaaaatatgctaaacagaaagagtttaaggacgcaactgataacatcttccactcagattatagtgtctccaaggcattaaagacagttatgctaaaagataagtcgtatgatctgattgatgagaaagatttcccagataaggctttgcgagaagctgtgatggcgcaggttggaaccagaaaaggtgatttggaacgtttcaatggcacattacgattggataatccagcgattcaaagtttagaaggtctaaataaatttaaaaaattagctcaattagacttgattggcttatctcgcattacaaagctcgaccgttctgttttacccgctaatatgaagccaggcaaagataccttggaaacagttcttgaaacctataaaaaggataacaaagaagaacctgctactatcccaccagtatctttgaaggtttctggtttaactggtctgaaagaattagatttgtcaggttttgaccgtgaaaccttggctggtcttgatgccgctactctaacgtctttagaaaaagttgatatttctggcaacaaacttgatttggctccaggaacagaaaatcgacaaatttttgatactatgctatcaactatcagcaatcatgttggaagcaatgaacaaacagtgaaatttgacaagcaaaaaccaactgggcattacccagatacctatgggaaaactagtctgcgcttaccagtggcaaatgaaaaagttgatttgcaaagccagcttttgtttgggactgtgacaaatcaaggaaccctaatcaatagcgaagcagactataaggcttaccaaaatcataaaattgctggacgtagctttgttgattcaaactatcattacaataactttaaagtttcttatgagaactataccgttaaagtaactgattccacattgggaaccactactgacaaaacgctagcaactgataaagaagagacctataaggttgacttctttagcccagcagataagacaaaagctgttcatactgctaaagtgattgttggtgacgaaaaaaccatgatggttaatttggcagaaggcgcaacagttattggaggaagtgctgatcctgtaaatgcaagaaaggtatttgatgggcaactgggcagtgagactgataatatctctttaggatgggattctaagcaaagtattatatttaaattgaaagaagatggattaataaagcattggcgtttcttcaatgattcagcccgaaatcctgagacaaccaataaacctattcaggaagcaagtctacaaatttttaatatcaaagattataatctagataatttgttggaaaatcccaataaatttgatgatgaaaaatattggattactgtagatacttacagtgcacaaggagagagagctactgcattcagtaatacattaaataatattactagtaaatattggcgagttgtctttgatactaaaggagatagatatagttcgccagtagtccctgaactccaaattttaggttatccgttacctaacgccgacactatcatgaaaacagtaactactgctaaagagttatctcaacaaaaagataagttttctcaaaagatgcttgatgagttaaaaataaaagagatggctttagaaacttctttgaacagtaagatttttgatgtaactgctattaatgctaatgctggagttttgaaagattgtattgagaaaaggcagctgctaaaaaaataa

SEQ ID NO: 76 - DNA, 558 bp, Streptococcus pyogenes
atgattgaagcaagtaagcttaaagcaggtatgacatttgaagcagaaggaaaattaatccgtgtccttgaagctagccaccacaaaccaggtaaaggaaacactatcatgcgtatgaaactacgtgatgtgcgtacaggttctacttttgacacaacttaccgcccagatgaaaaatttgagcaagccatcattgaaactgtcccagcacaatacctatacaaaatggatgacactgcttacttcatgaacactgacacttatgatcagtacgaaattccagttgctaacgttgagcaagaattgctttacattcttgaaaactcagacgtgaaaatccaattttatggaagtgaagtgattggggtaacggttccaacaactgttgaattgaccgttgcggaaacacaaccatctattaaaggagcgacagtgacgggttcagggaaacctgcaactcttgagacaggacttgttgttaacgttccagactttatcgaagctggccaaaaactaatcattaacactgcagaaggtacttacgtttctcgtgcttaa

SEQ ID NO: 77 - DNA, 1407 bp, Streptococcus pyogenes
atgactaaaacattacctaaagattttatttttggtggtgctacagctgcttaccaggctgaaggcgctacccacacagatggtaaaggaccagtagcttgggataaatacttagaagacaactattggtacacagctgagccagcaagtgatttttataatcgttaccctgtcgatttgaaacttagtgaagaatttggtgtcaacggcatccgtatctctattgcctggtctcgtatttttccaacaggaaaaggagaagttaaccctaaaggagtagaatactaccacaatctttttgcagagtgtcataagcgtcatgttgagccttttgttacacttcaccattttgataccccagaagctctccactcggatggtgacttcctcaatcgtgagaacattgaacattttgtaaattatgcagaattttgttttaaagaattctcagaagttaactattggacaacatttaacgaaattgggcctattggtgatggccaatacttagttggtaaattccctccaggtatccaatatgatcttgctaaagttttccaatcacaccataacatgatggtctctcatgctcgtgcagtcaaactctttaaagatagtggttattcaggtgaaattggtgttgtccatgcacttccaactaagtatccatttgacgctaacaatcctgatgatgttagagcagctgaacttgaagatatcatccataataaatttatccttgatgctacttatcttggtaagtattcagataaaacaatggaaggtgttaaccatatccttgaggtgaatggcggtgaacttgatcttcgcgaagaagattttgccgcactagacgccgcaaaagatttgaatgatttccttggtattaactactatatgagtgattggatgcaagcttttgatggtgagactgaaatcattcacaatggcaagggtgaaaaaggcagctctaaataccaaatcaagggtgttggtcgaagaaaagcacccgttgatgttccaaaaacggactgggactggattatcttcccacaaggcttatatgatcaaatcatgcgtgtcaaagccgattatcctaattacaagaaaatttacattacagagaatggtcttggctacaaagatgagtttgtagataatactgtctatgatggtggacgtatcgattatgtgaaaaaacacttagaagttatttctgatgctatttctgatggtgcaaatgttaaaggatactttatgtggtcactgatggatgtcttttcatggtcaaatggctatgaaaaacgttacggtctcttctatgttgattttgaaactcaagaacgttatcctaagaagagtgcctactggtataaaaaagtagcagaaactcaagtgattgaatga

SEQ ID NO: 78 - DNA, 3498 bp, Streptococcus pyogenes
atgaaaaagaaagtcaaccaaggatcaaagcgctatcaatatctgttaaaaaagtgggggataggttttgtaatcgctgcaactgggactgtcgtgttagggtgcacccctagtatcttaacacatcaagttgctgctaaaaccattgttggactagcccgcgatgaagctcaacaaggagatggcaatgctaaatctggtgatggtcttcaatcgtctagcaaggaggcaaaaccagttttagacagctcgtcagctaatcctgctagtattgctgagcatcatttgcgtatgcattttaaaacattgccagctggtgagtcgctaggaagcttgggactttgggtgtggggagatgtggatcaaccttcaaaggattggccaaatggtgctatcaccatgacaaaagcgaaaaaagatgactatggctattatctagatgtgccactagcagctaaacaccgccagcaagtgtcttatctcattaataataaagctggagagaatctttcaaaggaccagcacatctcgcttctcacgccaaaaatgaatgaagtttggatagacgagaattaccatgcgcacgcttatcgacctttgaaaaaaggttaccttcgaatcaactaccacaatcaatcgggacactacgataacttagctgtctggacctttaaagatgtcaaaaccccaacgaccgactggccaaatggacttgacttgtcacataaagggcattatggagcttatgttgatgtccccttaaaagaaggagctaacgaaatcggatttttaatccttgataaaagtaagacaggagatgctattaaagtgcaaccaaaagattatctatttaaagagttagacaatcatactcaggtttttgtcaaagacactgacccaaaagtttacaacaatccttattatattgatcaggttagtctcaaaggagctgaacaaaccacgccaaatgagattaaagccatttttacgaccttagatgggcttgatgaagatgcggtgaaacaaaacatcaagatcactgacaaagcagggaaaactgttgcaattgatgagttgacacttgacagggataagtctgtaatgacattaaagggtgattttaaggcgcaaggtgcagtctacacggttacatttggagaagttagccaagtcgctcgccaatcctggcaattaaaagataaactctatgcttacgatggtgaacttggagctaccctagctaaggatggttctgttgatttagcgctatggtctccaagtgctgatactgttaaggttgtcgtttatgataaacaagatcagacaagggtggttggtcaagctgatttgaccaagtcggacaagggtgtttggagagctcatctaacttctgacagtgtcaagggcattagtgattacacaggctactattacctttatgaaatcacgcgcggtcaggaaaaagtcatggttttggatccttacgccaaatctctcgctgcctggaatgatgcgactgctactgatgacatcaaaacagcaaaagctgcctttattgatccaagcaaactaggaccaacaggccttgattttgccaaaattaacaactttaaaaagcgtgaagacgctattatctatgaagcacatgtgcgagattttacgtcagataaggctctagaaggcaagttaacacacccttttgggactttttcagctttcgttgaacagctagactatctcaaagacttgggggttacccacgttcaattgctaccggttttgagttatttttatgccaatgagctggacaagagccgctcaacagcctacacgtcttcagacaataattacaactggggttatgacccacaacactactttgccctttctggcatgtattcggcaaatcctaatgaccctgctttacgtatcgcagagcttaaaaaccttgtcaatgagattcacaaacgtggtatgggtgttatttttgatgtggtttataaccacacggctagaacctatctctttgaagatttggaacccaactactatcattttatgaatgctgatggtacagctagagagagttttggcggaggtcgtctaggaacgacacatgccatgagtcgtcgtatcttggtggattcgattacttatctgactcgtgaattcaaggtagatggttttcgtttcgacatgatgggtgaccatgatgcggcagctattgagcaagcctttaaggcagccaaagccattaatccaaataccattatgattggcgaaggctggcgtacctaccaaggtgatgaggggaaaaaagaaattgcggcagatcaagattggatgaaagcaaccaatacggtcggtgttttctctgatgatatcagaaataccctcaagtcaggttttccaaatgaaggcacagcagcctttattactggtggcgcaaaaaatctagaaggtttattcaaaacgatcaaagcacagcctggtaactttgaagcagatgccccaggagatgtagtgcagtatattgcagcccatgacaacctgaccttacatgatgtcattgccaaatccatcaataaggatcctaaagtggctgaagaagagattcacaagcgtattcgtctaggaaataccatgattttaactgctcaagggactgcctttatccattctggtcaggaatatggacgaaccaagcagcttctaaatcccgactacaagacaaaggcgtctgatgacaaggtgccaaataaggcgactctgattgatgctgtagcgcaatacccttacttcatccacgattcttatgattcgtctgatgcggtcaatcattttgactgggcaaaggcaacagattccatagctcacccgattagcaaccaaacaaaagcctatacacagggactaattgcgttgcgtcgctcaacagatgcctttacaaaagcaaccaaagctgaggtagatcgggatgtgaccttgatcacccaagcaggacaagatggtattcaacaagaggacctcatcatgggttaccaaacagtggcatcaaatggagatcgctatgctgtctttgtcaatgcagacaacaagacccgcaaggtagttttacctcaagcctaccgctatttgctaggagcccaagtgcttgttgatgctgagcaagctggtgttactgccattgctaagcctaagggagtccagtttaccaaagaaggcttgactattgaaggcctaactgccctggtcctcaaagtatcctcaaaaacggctaatccctctcagcaaaagagtcagacagacaatcatcaaaccaaaacaccagatggctcaaaagacctagacaaatcattaatgactagaccaaaaagagctaaaacaaaccaaaagctcccaaaaacgggtgaagcctcctcaaaaggcttattagcagctggaatagctctgcttttattggctattagcctgttgatgaagcgccaaaaagattag

SEQ ID NO: 79 - DNA, 1323 bp, Streptococcus pyogenes
atgaaaaattacttatctattggagtgattgcactgctgtttgcattaacatttggaacagtcaagtcggtccaagctattgctgggtatggatggctaccagaccgtccacctatcaataacagccagttagttgttagtatggccggtatcgttgaaggtaccgataaaaaagtttttataaatttttttgaaatcgatctaacatcacaacctgctcacggaggaaagacagagcagggcttaagtccaaaatcaaaaccatttgctacagataatggcgcaatgccacataaacttgaaaaagctgacttattaaaagctattcaaaaacagctgatcgctaacgttcacagtaacgacggctactttgaggtcattgattttgcaagcgatgcaaccattactgatcgaaacggcaaggtctactttgctgacaaagatggttcggtaaccttgccgacccaacctgtccaagaatttttgttaaagggacatgtgcgcgttagaccatataaagaaaaaccagtacaaaatcaagcaaaatctgttgatgtagaatatactgtacagtttactcctttaaaccctgatgacgatttcagaccagggctcaaagatactaagctattgaaaacactagctatcggtgacaccatcacatctcaagaattactagctcaagcacaaagcattttaaacaaaacccacccaggctatacgatttatgaacgtgactcctcaatcgtcactcatgacaatgacattttccgtacgattttaccaatggatcaagagtttacttaccatgtcaaaaatcgggaacaagcttatgagatcaatcctaaaacaggtattaaagaaaaaacgaacaacactgatctggtctctgagaaatattacgtccttaaacaaggggaaaagccgtatgatccctttgatcgcagtcacttgaaactgttcaccatcaaatacgttgatgtcaacaccaacgaattgctaaaaagcgagcagctcttaacagctagcgaacgtaacttagacttcagagatttatacgatcctcgtgataaggctaaactactctacaacaatctcgatgcttttgatatcatggactataccttaactggaaaagtagaggataatcacgataagaataatcgtgtcgttacagtttatatgggcaagcgccctaaaggggcaaagggtagctatcatttagcttatgataaagatctctataccgaagaagaacgaaaagcttacagctacctgcgtgatacagggacacctatacctgataaccctaaagacaaataa

SEQ ID NO: 80 - DNA, 1047 bp, Streptococcus pyogenes
atgttgacatcaaagcaccataatctcaacaaactagtctggcgctacgggctaacctcagccgctgccgtccttctagcctttggaggcggggcaagcagcgttaaggctgaggtttcttctacgactatgacgtcgagtcaaagagagtcaaaaataaaagagatcgaagaaagtcttaaaaaatatccagaagtgtccaatgagaaattttgggaaagaaagtggtatggaacctattttaaagaagaagattttcaaaaggagctaaaagattttactgagaagaggcttaaggagattctagatttaattggtaaatctggaatcaagggagaccgtggtgagactggtcctgctggcccagccggaccacaaggtaaaactggtgagaggggcgcccaaggtcctaaaggtgaccgcggtgagcaaggaatccaaggtaaagctggtgaaaaaggtgagcgcggtgaaaaaggcgacaaaggtgaaaccggtgaacgcggtgaaaaaggcgaagctggaatccaaggcccacaaggtgaagctggtaaagatggcgctccaggtaaagatggagctccaggcgaaaagggtgaaaaaggtgaccgcggtgaaaccggagctcagggtccagtaggcccacaaggtgaaaaaggtgaaacgggcgcccaaggcccagcaggcccacaaggtgaggcaggcaaaccaggtgagcaaggcccagcaggcccacaaggtgaagcaggccaaccaggcgaaaaagctccagaaaagagcccagaaggcgaagcaggccaaccaggcgaaaaagctccagaaaagagcaaagaggtaactccagctgcagaaaaacctgctgacaaagaagctaaccaaacgccagaacgccgcaatggcaatatggctaagacacctgtagccaacaaccacagacgtctaccagcaactggtgagcaagccaacccattctttacagcagcagcagtagcagtgatgacaacagctggtgtcctagccgttacaaaacgcaaagaaaacaactaa

SEQ ID NO: 81 - DNA, 567 bp, Streptococcus pyogenes
atgatactcttaattgataattacgattcatttacctacaacctcgcccaatatttaagtgaatttgacgagacgattgtcttgtataaccaagacccaaacttatatgacatggccaaaaaagctaacgctctagtcctctcacctggtcctggttggcccaaggaagccaaccaaatgccaaaactcattcaagacttttaccaaacaaaacctatcttaggagtgtgtctgggacaccaagctatcgctgaaactttagggggaaccttacgcttggccaaacgcgtcatgcatgggagacaaagcaccattgaaacgcaaggccctgctagtctttttcgctccctgccacaagagatcaccgtcatgcgctaccattccatcgttgtggatcagttaccaaaaggttttagcgtaaccgctagagactgtgacgatcaagaaatcatggcatttgaacaccacaccctgccactttttgggctacaatttcacccagaaagcatcggaactcctgatggcatgaccatgattgccaacttcatcgcagccattccccgttaa

SEQ ID NO: 82 - DNA, 1629 bp, Streptococcus pyogenes
gtgtcaaaatacctaaaatacttctctattatcacgttatttttgactgggcttattttagttgcatgtcaacaacaaaagcctcaaacaaaagaacgtcagcgcaaacaacgtccaaaagacgaacttgtcgtttctatgggggcaaagctccctcatgaattcgatccaaaggaccgttatggagtccacaatgaagggaatatcactcatagcactctattgaaacgttctcctgaactagatataaaaggagagcttgctaaaacataccatctctctgaagatgggctgacttggtcgtttgacttgcatgatgattttaaattctcaaatggtgagcctgttactgctgatgatgttaagtttacttatgatatgttgaaagcagatggaaaggcttgggatctaaccttcattaagaacgttgaagtagttgggaaaaatcaggtcaatatccatttgactgaggcgcattcgacatttacagcacagttgactgaaatcccaatcgtccctaaaaaacattacaatgataagtataagagcaatcctatcggttcaggaccttacatggtaaaagaatataaggctggagaacaagctatttttgttcgtaacccttattggcatgggaaaaaaccatactttaaaaaatggacttgggtcttacttgatgaaaacacagcactagcagctttagaatctggtgatgttgatatgatctacgcaacgccagaacttgctgataaaaaagtcaaaggcacccgcctccttgatattccatcaaatgatgtgcgcggcttatcattaccttatgtgaaaaagggcgtcatcactgattctcctgatggttatcctgtaggaaatgatgtcactagtgatccagcaatccgaaaagccttgactattggtttaaataggcaaaaagttctcgatacggttttaaatggttatggtaaaccagcttattcaattattgataaaacaccattttggaatccaaaaacagccattaaagataataaagtagctaaagctaagcaattattgacaaaagcgggatggaaagaacaagcagacggtagccgtaaaaaaggtgaccttgatgcagcgtttgatctgtactaccctactaatgatcaattgcgagcgaacttagccgttgaagtagcagagcaagccaaggccctagggattactattaaactcaaagctagtaactgggatgaaatggcaacgaagtcacatgactcagccttactttatgccggaggacgtcatcacgcgcagcaattttatgaatcgcatcatccaagcctagcagggaaaggttggaccaatattacgttttataacaatcctaccgtgactaagtaccttgacaaagcaatgacatcttctgaccttgataaagctaacgaatattggaagttagcgcagtgggatggcaaaacaggtgcttctactcttggagatttgccaaatgtatggttggtgagccttaaccatacttatattggtgataaacgtatcaatgtaggtaaacaaggcgtccacagtcatggtcatgattggtcattattgactaacattgccgagtggacttgggatgaatcaactaagtaa

SEQ ID NO: 83 - DNA, 2478 bp, Streptococcus pyogenes
gtgaagaaaacatatggttatatcggctcagttgctgctattttactagctactcatattggaagttaccaacttggtaagcatcatatgggttcagcaacaaaggacaatcaaattgcctatattgatgatagcaaaggtaaggcaaaagcccctaaaacaaacaaaacgatggatcaaatcagtgctgaagaaggcatctctgctgaacagatcgtagtcaaaattactgaccaaggctatgtgacctcacatggtgaccattatcatttttacaatgggaaagttccttatgatgcgattattagtgaagagttgttgatgacggatcctaattaccgttttaaacaatcagacgttatcaatgaaatcttagacggttacgttattaaagtcaatggcaactattatgtttacctcaagccaggtagcaagcgcaaaaacattcgaaccaaacaacaaattgctgagcaagtagccaaaggaactaaagaagctaaagaaaaaggtttagctcaagtggcccatctcagtaaagaagaagttgcggcagtcaatgaagcaaaaagacaaggacgctatactacagacgatggctatatttttagtccgacagatatcattgatgatttaggagatgcttatttagtacctcatggtaatcactatcattatattcctaaaaaggatttgtctccaagtgagctagctgctgcacaagcctactggagtcaaaaacaaggtcgaggtgctagaccgtctgattaccgcccgacaccagccccagccccaggtcgtaggaaagccccaattcctgatgtgacgcctaaccctggacaaggtcatcagccagataacggtggctatcatccagcgcctcctaggccaaatgatgcgtcacaaaacaaacaccaaagagatgagtttaaaggaaaaacctttaaggaacttttagatcaactacaccgtcttgatttgaaataccgtcatgtggaagaagatgggttgatttttgaaccgactcaagtgatcaaatcaaacgcttttgggtatgtggtgcctcatggagatcattatcatattatcccaagaagtcagttatcacctcttgaaatggaattagcagatcgatacttagccggccaaactgaggacgatgactcaggttcagatcactcaaaaccatcagataaagaagtgacacatacctttcttggtcatcgcatcaaagcttacggaaaaggcttagatggtaaaccatatgatacgagtgatgcttatgtttttagtaaagaatccattcattcagtggataaatcaggagttacagctaaacacggagatcatttccactatataggatttggagaacttgaacaatatgagttggatgaggtcgctaactgggtgaaagcaaaaggtcaagctgatgagcttgctgctgctttggatcaggaacaaggcaaagaaaaaccactctttgacactaaaaaagtgagtcgcaaagtaacaaaagatggtaaagtgggctatatgatgccaaaagatggcaaggactatttctatgctcgtgatcaacttgatttgactcagattgcctttgccgaacaagaactaatgcttaaagataagaaacattaccgttatgacattgttgacacaggtattgagccacgacttgctgtagatgtgtcaagtctgccgatgcatgctggtaatgctacttacgatactggaagttcgtttgttatccctcatattgatcatatccatgtcgttccgtattcatggttgacgcgcgatcagattgcaacaatcaagtatgtgatgcaacaccccgaagttcgtccggatatatggtctaagccagggcatgaagagtcaggttcggtcattccaaatgttacgcctcttgataaacgtgctggtatgccaaactggcaaattatccattctgctgaagaagttcaaaaagccctagcagaaggtcgttttgcaacaccagacggctatattttcgatccacgagatgttttggccaaagaaacttttgtatggaaagatggctcctttagcatcccaagagcagatggcagttcattgagaaccattaataaatctgatctatcccaagctgagtggcaacaagctcaagagttattggcaaagaaaaacgctggtgatgctactgatacggataaacccaaagaaaagcaacaggcagataagagcaatgaaaaccaacagccaagtgaagccagtaaagaagaagaaaaagaatcagatgactttatagacagtttaccagactatggtctagatagagcaaccctagaagatcatatcaatcaattagcacaaaaagctaatatcgatcctaagtatctcattttccaaccagaaggtgtccaattttataataaaaatggtgaattggtaacttatgatatcaagacacttcaacaaataaacccttaa

SEQ ID NO: 84 - DNA, 1140 bp, Streptococcus pyogenes
atgcgtagagcagaaaataacaaacacagccgctattccattcgcaaactgagcgttggggtaacgagtatagcaattgcgagtctctttttaggaaaggttgcctatgccgtagatggcatccctccaatctctcttactcaaaagactacagccactacatcagaaaattggcatcatattgataaggatggccttattcctttaggtataagcttagaagctgccaaagaggaatttaaaaaagaagtagaagaatcacgtttatctgaagcacaaaaagaaacgtataaacaaaaaattaaaactgcaccagacaaagataagctattattcacgtatcatagtgagtatatgacagccgttaaggatcttccagcgtctactgagtctactactcagccagttgaggcacccgtgcaggagacacaggcatcagcttcagattcgatggtgacaggtgattcaacatcagttacgactgattctcctgaggaaaccccatcttcggaaagtccagtggccccagctttatctgaggctccagctcaaccagctgagagtgaggaaccttcagtagcagcatcttctgaggaaaccccatctccatcaactccagcggccccagaaactcctgaagaaccagcagctccatctccatcacctgagagtgaggaaccttcagtagcagctccttctgaggaaaccccatctccagaaactcctgaagaaccagcagctccatctcaaccagctgagagtgaagaatcttcagtagcagctacgacaagcccgtctccatcaactccagctgaatcagagactcagacgccaccagctgttactaaagactctgataagccatcttcagcagctgaaaaaccagcagcctcttcacttgtttcagaacaaaccgttcaacaaccaacttcaaagagatcttctgataaaaaagaagagcaagaacagtcttactctccaaatcgctcattgtcaagacaggttagggcccatgagtcaggtaagtacttgccttcaacaggtgaaaaagcacagccactctttatagctactatgactttgatgtctctatttggcagtcttttagtcacaaaacgccaaaaagaaactaaaaaatag

SEQ ID NO: 85 - DNA, 3546 bp, Streptococcus pyogenes
ttgcgtaaaaaacaaaaattaccatttgataaacttgccattgcgctcatgtctacgagcatcttgctcaatgcacaatcagacattaaagcaaatactgtgacagaagacactcctgctaccgaacaagctgtagaaaccccacaaccaacagcggtttctgaggaagcaccatcatcaaaggaaaccaaaaccccacaaactcctgatgacgcagaagaaacaatagcagatgacgctaatgatctagcccctcaagctcctgctaaaactgctgatacaccagcaacctcaaaagcgactattagggatttgaacgacccttctcaggtcaaaaccctgcaggaaaaagcaggcaaaggagctgggactgttgttgcagtgattgatgctggttttgataaaaatcatgaagcgtggcgcttaacagacaaaaccaaagcacgttaccaatcaaaagaagatcttgaaaaagctaaaaaagagcacggtattacctatggcgagtgggtcaatgataaggttgcttattaccacgactatagtaaagatggtaaaaccgctgtcgatcaagagcacggcacacacgtgtcagggatcttgtcaggaaatgctccatctgaaacgaaagaaccttaccgcctagaaggtgcgatgcctgaggctcaattgcttttgatgcgtgtcgaaattgtaaatggactagcagactatgctcgtaactacgctcaagctatcatagatgctgtcaacttgggagctaaggtgattaatatgagctttggtaatgctgcactagcctatgccaaccttccagacgaaaccaaaaaagcctttgactatgccaaatcaaaaggtgttagcattgtgacctcagctggtaatgatagtagctttgggggcaagacccgtctacctctagcagatcatcctgattatggggtggttgggacacctgcagcggcagactcaacattgacagttgcttcttacagcccagataaacagctcactgaaactgctacggtcaaaacagccgatcagcaagataaagaaatgcctgttctttcaacaaaccgttttgagccaaacaaggcttacgactatgcttatgctaatcgtgggatgaaagaggatgattttaaggatgtcaaaggtaagattgcccttattgaacgtggcgatattgatttcaaagataagattgcaaacgctaaaaaagctggtgctgtaggagtcttgatctatgacaatcaggacaagggcttcccgattgaattgccaaatgttgatcagatgcctgcggcctttatcagtcgaaaagatggtctcttattaaaagagaatccccaaaaaaccatcaccttcaatgcgacacctaaggtattgccaacagcaagtggcaccaaactaagccgcttctcaagctggggtctgacagctgacggcaatattaagccagatattgcagcacccggccaagatattttgtcatcagtggctaacaacaagtatgccaaactttctggaactagtatgtctgcgccattagtagcgggtatcatgggactgttgcaaaagcaatatgagacacagtatcctgatatgacaccatcagagcgtcttgatttagctaaaaaagtattgatgagctcagcaactgccttatatgatgaagatgaaaaagcttatttttctcctcgccaacaaggagcaggagcagtcgatgctaaaaaagcttcagcagcaacgatgtatgtgacagataaggataatacctcaagcaaggttcacctgaacaatgtttctgataaatttgaagtaacagtaacagttcacaacaaatctgataaacctcaagagttgtattaccaagcaactgttcaaacagataaagtagatggaaaactctttgccttggctcctaaagcattgtatgagacatcatggcaaaaaatcacaattccagccaatagcagcaaacaagtcaccattccaatcgatgttagtcaatttagcaaggacttgcttgccccaatgaaaaatggctatttcttagaaggttttgttcgtttcaaacaagatcctacaaaagaagagcttatgagtattccctatattggtttccgaggtgattttggcaatctgtcagccttagaaaaaccaatctatgatagcaaagacggtagcagctactatcatgaagcaaatagtgatgccaaagaccaattagatggtgatggattacagttttacgctctgaaaaataactttacagcacttactacagagtctaatccatggacgattattaaagctgtcaaagaaggggttgaaaacatagaggatatcgaatcttcagagatcacagaaaccatttttgcaggtacttttgcaaaacaagacgatgatagccactactatatccaccgtcacgctaatggcaagccatatgctgcgatctctccaaatggggacggtaacagagattatgtccaattccaaggtactttcttgcgtaatgctaaaaaccttgtggctgaagtcttggacaaagaaggaaatgttgtttggacaagtgaggtaaccgagcaagttgttaaaaactacaacaatgacttggcaagcacacttggttcaacccgttttgaaaaaacgcgttgggacggtaaagataaagacggcaaagttgttgctaacggaacatacacctatcgtgttcgctacactccgattagctcaggtgcaaaagaacaacacactgattttgatgtgattgtagacaatacgacacctgaagtcgcaacatcggcaacattctcaacagaagatcgtcgtttgacacttgcatctaaaccaaaaaccagccaaccggtttaccgtgagcgtattgcttacacttatatggatgaggatctgccaacaacagagtatatttctccaaatgaagatggtacctttactcttcctgaagaggctgaaacaatggaaggcgctactgttccattgaaaatgtcagactttacttatgttgttgaagatatggctggtaacatcacttatacaccagtgactaagctattggaaggccactctaataaaccagaacaagacggttcagatcaagcaccagacaaaaaaccagaaactaaaccagaacaagacggttcaggtcaagcaccagataaaaaaccagaaactaaaccagaacaagacggttcaggtcaaacaccagacaaaaaaccagaaactaaaccagaacaagacggttcaggtcaaacaccagataaaaaaccagaaactaaaccagaaaaagatagttcaggtcaaacaccaggtaaaactcctcaaaaaggtcaaccttctcgtactctagagaaacgatcttctaagcgtgctttagctacaaaagcatcaacaaaagatcagttaccaacgactaatgacaaggatacaaatcgtttacatctccttaagttagttatgaccactttcttcttgggattagtagctcatatctttaaaacaaaacgcactgaagattag

SEQ ID NO: 86 - DNA, 927 bp, Streptococcus pyogenes
atgaatattagaaataagattgaaaatagtaaaacactactatttacatcccttgtagccgtggctctactaggagctacacaaccagtttcagccgaaacgtatacatcacgcaattttgactggtctggagatgactggtctggagatgactggcctgaagatgactggtctggagatggtttgtctaaatatgaccggtctggagttggtttgtctcaatatggctggtctaaatatggctggtctagcgataaagaagaatggcctgaagattggcctgaagatgactggtctagcgataaaaaagatgagacagaagataaaacgagaccaccatatggagaagcattaggtacagggtatgaaaaacgtgatgattggggaggacctggtacggtggcaactgacccttacactccaccatatggaggagcattaggtacagggtatgaaaaacgtgatgattggggaggacctggtacggtggcaactgacccttacactccaccatatggaggagcattaggtacagggtatgaaaaacgtgatgattggagaggacctggacatattcctaaacctgagaacgaacaatcaccaaacccacttcatattcctgaacctcctcagattgagtggcctcagtggaatggctttgatggattatcatttggcccctctgattggggccaatctgaggacacccctccaagtgaacctcgtgtgccagaaaaaccgcaacatactcctcaaaaaaatccacaagaatcagattttgatagagggttttcagctggcttgaaagcaaaaaactcaggtagaggtattgattttgaaggtttccagtatggtggctggtcagacgaatataaaaaaggttacatgcaagccttcggtacaccatatacaccatcagcaacgtaa

SEQ ID NO: 87 - DNA, 1455 bp, Streptococcus pyogenes
atggctaaaaataacacgaatagacactattcgcttagaaaattaaaaacaggaacggcttcagtagcggtagctttgactgttttaggggcaggttttgcgaatcaaacagaggttaaggctaacggtgatggtaatcctagggaagttatagaagatcttgcagcaaacaatcccgcaatacaaaatatacgtttacgttacgaaaacaaggacttaaaagcgagattagagaatgcaatggaagttgcaggaagagattttaagagagctgaagaacttgaaaaagcaaaacaagccttagaagaccagcgtaaagatttagaaactaaattaaaagaactacaacaagactatgacttagcaaaggaatcaacaagttgggatagacaaagacttgaaaaagagttagaagagaaaaaggaagctcttgaattagcgatagaccaggcaagtcgggactaccatagagctaccgctttagaaaaagagttagaagagaaaaagaaagctcttgaattagcgatagaccaagcgagtcaggactataatagagctaacgtcttagaaaaagagttagaaacgattactagagaacaagagattaatcgtaatcttttaggcaatgcaaaacttgaacttgatcaactttcatctgaaaaagagcagctaacgatcgaaaaagcaaaacttgaggaagaaaaacaaatctcagacgcaagtcgtcaaagccttcgtcgtgacttggacgcatcacgtgaagctaagaaacaggttgaaaaagatttagcaaacttgactgctgaacttgataaggttaaagaagacaaacaaatctcagacgcaagccgtcaaggccttcgccgtgacttggacgcatcacgtgaagctaagaaacaggttgaaaaagatttagcaaacttgactgctgaacttgataaggttaaagaagaaaaacaaatctcagacgcaagccgtcaaggccttcgccgtgacttggacgcatcacgtgaagctaagaaacaagttgaaaaagctttagaagaagcaaacagcaaattagctgctcttgaaaaacttaacaaagagcttgaagaaagcaagaaattaacagaaaaagaaaaagctgaactacaagcaaaacttgaagcagaagcaaaagcactcaaagaacaattagcgaaacaagctgaagaacttgcaaaactaagagctggaaaagcatcagactcacaaacccctgatacaaaaccaggaaacaaagctgttccaggtaaaggtcaagcaccacaagcaggtacaaaacctaaccaaaacaaagcaccaatgaaggaaactaagagacagttaccatcaacaggtgaaacagctaacccattcttcacagcggcagcccttactgttatggcaacagctggagtagcagcagttgtaaaacgcaaagaagaaaactaa

SEQ ID NO: 88 - DNA, 1626 bp, Streptococcus pyogenes
atgaagaaaaggaaattgttagcagtaacactattaagtaccatactcttaaacagtgcagtgccattagttgttgctgatacctccttgcgtaatagcacatcatccactgatcagcctactacagcagatactgatacggatgacgagagtgaaacaccaaaaaaagacaaaaaaagcaaggaaacagcgtcgcagcacgacacccaaaaagaccataagccatcacacactcacccaacccccccttcaaatgatactaagcagaccgatcaggcatcatctgaagctactgacaaaccaaataaagacaaaaacgacaccaagcaaccagacagcagtgatcaatccaccccatctcccaaagaccagtcgtctcaaaaagagtcacaaaacaaagacggccgacctaccccatcacctgatcagcaaaaagatcagacacctgataaaacaccagaaaaatcagctgataaaacccctgaaaaaggaccagaaaaagcaactgataaaacaccagagccaaatcgtgacgctccaaaacccatccaacctcctttagcagctgctcctgtctttataccttggagagaaagtgacaaagacctgagcaagctaaaaccaagcagtcgctcatcagcggcttacgtgagacactggacaggtgactctgcctacactcacaacctgttgtcacgccgttatgggattactgctgaacagctagatggttttttgaacagtctaggtattcactatgataaagaacgcttaaacggaaagcgtttattagaatgggaaaaactaacaggactagacgttcgagctatcgtagctattgcaatggcagaaagctcactaggtactcagggagttgctaaagaaaaaggagccaatatgtttggttatggcgcctttgacttcaacccaaacaatgccaaaaaatacagcgatgaggttgctattcgtcacatggtagaagacaccatcattgccaacaaaaaccaaacctttgaaagacaagacctcaaagcaaaaaaatggtcactaggccagttggataccttgattgatggtggggtttactttacagatacaagtggcagtgggcaaagacgagcagatatcatgaccaaactagaccaatggatagatgatcatggaagcacacctgagattccagaacatctcaagataacttccgggacacaatttagcgaagtgcccgtaggttataaaagaagtcagccacaaaacgttttgacctacaagtcagagacctacagctttggccaatgcacttggtacgcctataatcgtgtcaaagagctaggttatcaagtcgacaggtacatgggtaacggtggcgactggcagcgcaagccaggttttgtgaccacccataaacctaaagtgggctatgtcgtctcatttgcaccaggccaagcaggagcagatgcaacctatggtcacgttgctgttgtagagcaaatcaaagaagatggttctatcttaatttcagagtcaaatgttatgggactaggcaccatttcctatcggacgttcacagctgagcaggctagtttgttgacctatgtcgtaggggacaaactcccaagaccataa

SEQ ID NO: 89 - DNA, 1197 bp, Streptococcus pyogenes
atgaataaaaagaaattaggtgtcagattattaagtcttttagcattaggtggatttgttcttgctaacccagtatttgccgatcaaaactttgctcgtaacgaaaaagaagcaaaagatagcgctatcacatttatccaaaaatcagcagctatcaaagcaggtgcacgaagcgcagaagatattaagcttgacaaagttaacttaggtggagaactttctggctctaatatgtatgtttacaatatttctactggaggatttgttatcgtttcaggagataaacgttctccagaaattctaggatactctaccagcggatcatttgacgctaacggtaaagaaaacattgcttccttcatggaaagttatgtcgaacaaatcaaagaaaacaaaaaattagacactacttatgctggtaccgctgagattaaacaaccagttgttaaatctctccttgattcaaaaggcattcattacaatcaaggtaacccttacaacctattgacacctgttattgaaaaagtaaaaccaggtgaacaatcttttgtaggtcaacatgcagctacaggatgtgttgctactgcaactgctcaaattatgaaatatcataattaccctaacaaagggttgaaagactacacttacacactaagctcaaataacccatatttcaaccatcctaagaacttgtttgcagctatctctactagacaatacaactggaacaacatcttacctacttatagcggaagagaatctaacgttcaaaaaatggcgatttcagaattgatggctgatgttggtatttcagtagacatggattatggtccatctagtggttctgcaggtagctctcgtgttcaaagagccttgaaagaaaactttggctacaaccaatctgttcaccaaatcaaccgtggcgactttagcaaacaagattgggaagcacaaattgacaaagaattatctcaaaaccaaccagtatactaccaaggtgtcggtaaagtaggcggacatgcctttgttatcgatggtgctgacggacgtaacttctaccatgttaactggggttggggtggagtctctgacggcttcttccgtcttgacgcactaaacccttcagctcttggtactggtggcggcgcaggcggcttcaacggttaccaaagtgctgttgtaggcatcaaaccttag

SEQ ID NO: 90 - DNA, 816 bp, Streptococcus pyogenes
atgaatctacttggatcaagacgggttttttctaaaaaatgtcggctagtaaaattttcaatggtagctcttgtatcagccacaatggctgtaacaacagtcacacttgaaaatactgcactggcacgacaaacacaggtctcaaatgatgttgttctaaatgatggcgcaagcaagtacctaaacgaagcattagcttggacattcaatgacagtcccaactattacaaaaccttaggtactagtcagatcactccagcactctttcctaaagcaggagatattctctatagcaaattagatgagttaggaaggacgcgtactgctagaggtacattgacttatgccaatgttgaaggtagctacggtgttagacaatctttcggtaaaaatcaaaaccccgcaggctggactggaaaccctaatcatgtcaaatataaaattgaatggttaaatggtctatcttatgtcggagatttctggaatagaagtcatctcattgcagatagtctcggtggagatgcactcagagtcaatgccgttacagggacacgtacccaaaatgtaggaggtcgtgaccaaaaaggcggcatgcgctataccgaacaaagagctcaagaatggttagaagcaaatcgtgatggctatctttattatgaagctgctccaatctataacgcagacgagttgattccaagagctgtcgtggtatcaatgcaatcttctgataataccatcaacgagaaagtattagtttacaacacagctaatggctacaccattaactaccataacggtacacctactcagaaataa

SEQ ID NO: 91 - DNA, 2337 bp, Streptococcus pyogenes
atgagatttctagaacttttacaaaagaaattttttcctaaagcatatcaggaaaaacaattcttaatgcatcaaaaaacgcgtttaacgccacaacacaatcaaaagcagtattcgccaaatgccaatcatttggactcatcagctaccaaaaactcagaacaagaccctgcaacagctctgcaacgcagtagagcctacgaaggaagccctaaaagtcggcccgcttggttgcaaaagctggaagctgttttgccgtctcctcaacgtccaattcggcgtttttggcgccgctatcacatcggaaaactgctaatgattctgattggaactcttgtcttactcttaggatcatacttgttttacttatcaaaaacagctaaagtatctgatttacaagatgccttgaaggctacaacggttatttatgatcacaaaggagagtatgcaggcagtttatctggtcaaaaagggagttatgttgagctcaacgctatttcagatgatcttgagaatgctgttattgccactgaggataggactttttacagtaatagcggtattaatcttaaacgcttcttattggcggtagttacggcgggccgctttggaggtggctcaacgattacacagcaactggctaaaaatgcttatctctcacaagatcagacaattaaacgaaaggcccgagagttttttttggcgttagagttgaccaaaaaatacagtaaaaaagatattcttactatgtaccttaacaactcctactttggaaatggagtttggggagttgaagatgccagtcaaaaatattttggaaccacagctgctaacttaacactggatgaagctgccacattagcaggtatgctcaaaggacctgaaatatataacccttaccattctctaaaaaatgctactcaccgtagagatactgttttaggagcgatggttgatgccaaaaagattacccaaacaaaagctcagcaagctagagcagtagggctaaaaaatcgcttagctgatacttatgttggtaagacagatgactacaaatacccatcctactttgatgctgttattagtgaagcaatagcaacttatggtctttcagaaaaagacattgttaataatggatacaaagtttacactgagctagatcaaaattaccaaactggcatgcagacgacttttaacaacgatgaactatttcctgtttcagcttatgacggtagctctgctcaagcagctagtgttgctttagatcctaaaacaggaggtgttagaggtctgattggtcgtgtgaatagtagtgaaaatccgactttcagaagttttaactatgcgactcaagcaaaacgtagtcccgcatcaacaatcaaaccactcgtggtttacgcgccagccgttgcttcaggatggtcaattgaaaaagaactaccaaataccgttcaagatttcgatggctatcagccacataattatggaaattatgaatcagaagatgttcctatgtatcaagcattagcaaactcttataatattccagcagtttctacattgaacgatatcggaatcgataaagcctttacctatggtaaaacatttgggttagatatgagctctgccaaaaaagagttgggggtagctttaggtggcagcgtgacaaccaatccattggagatggctcaggcatatgctgcctttgccaataatggagtaatccatcctgcgcacttgattaaccggattgaaaatgccaggggtgaagtgcttaaaacctttactgataaggctaaacgtgttgtcagccagtctgttgcagataagatgacagccatgatgctaggtaccttttcaaatggaacagcagtcaatgctaacgtatatggctatacactagctggtaaaacagggacgacagaaaccaacttcaatcccgacttagcaggcgatcagtgggttattggttatacgccagatgttgttattagtcaatgggtaggatttaatcagaccgatgaaaatcattatctaacggattcaagtgcaggcacggcctcagctatttttagcactcaggcatcttacattttgccttataccaagggcagccaatttcatgtagataatgcctacgctcaaaatggtatttcagctgtttatggagtcaatgaaacaggtaatcaatcaggagttgatactcaatctattattgatggtttaagaaaatcagcacaagaagcttcgcaatcactatcaaaagcagtcgatcagtcagggttacgtgataaagcccaatctatttggaaagagattgttgactattttagatag

SEQ ID NO: 92 - DNA, 2199 bp, Streptococcus pyogenes
atggtaagtttagaagaagacaaggtgactgttcaacctgatattaaagtgattaaacgagatggtcgccttgttaattttgatagtacaaaaatctatagtgctttattaaaagcaagcatgaaagtaactcggatgtcgccacttgttgaggctaaattagaggctatttctgatcgcattatagcagaaattattgagcgttttccaactaatatcaaaatttatgaaatccaaaatattgtagagcataagcttcttgcagctaatgaatatgctattgcaaaagaatacattaattatcgtactcagcgtgactttgcacgttcacaagcaacagatatcaatttttctattgataaattaattaataaagatcaaacagttgttaatgaaaatgctaacaaagatagcgatgtttttaatactcaacgagatttaactgctggaatcgtagggaaatcgattggtttaaaaatgttaccttcgcatgttgctaatgctcatcaaaaaggagatatccattaccatgatttggattacagtccttatacaccgatgacgaactgctgtttaattgactttaagggcatgttagccaatggctttaaaattggtaatgctgaagtggaaagtcccaagtctattcaaactgcaacagctcagatctcacagattattgcgaatgtagcatcaagtcagtacggcggatgcacagctgatcgcattgacgagtttttagccccatatgcggagcttaactttaaaaaacatatggctgatgctaagaaatggatcgttgagactaagagagaaagctatgcttttgaaaagactcaaaaagatatttatgatgcgatgcagtctttggagtatgaaattaatacgctctttacgtctaatggtcaaacaccatttacttctttaggatttggtttggggacgtcttggtttgaacgtgagattcaaaaagctattttgaccattcggattaatggtcttggtagtgaacatcgcacggctattttccctaaattaattttcacggttaaacgtggcttgaatttagaaccagattcaccaaactatgatattaagactttggctttagaatgtgcgactaagcggatgtacccggatatgttatcttatgataaaattattgatttgacaggatctttcaaatctccaatgggatgccgctctttccttcaaggctggaaagatgaaaatgggcaagatgtgacctcaggccgtatgaatcttggggttgtcaccctcaatttacctcgcattgccatggaatcaaatggcgatatggataagttttgggagctgtttaatgagaggatgctaattagtaaggatgctttaatttatcgtgtcgaacgtgtcacagaagcaaaaccagcaaatgctcctattctttatcaatatggtgcttttggaaagcgtttggagaagacagggaatgtaaatgatctctttaagaatcgtcgtgcaacagtctctcttggctatattggtctttatgaagtggcgtctgttttttatggtggtcaatgggaaggtaatccagatgctaaagcttttaccttgtcaattgtcaaggcaatgaaacaggcctgtgaggattggtcagatgaatatggttatcatttctctgtttattcgactccatcagaaagtttgacagatcgcttttgtcgtttagatacggaaaaatttggcattgtgacagatattacggataaagaatactatacaaattcttttcactatgatgtgcgtaagagtccgacaccttttgaaaaattagattttgaaaaagattatccagaagcaggtgcttcaggtggttttatccactactgtgagtatcctgttttgcaacaaaatccaaaggccttggaagcggtttgggactatgcttatgatcgtgtggggtatttgggaaccaatacgcctattgataaatgctataattgccaatttgaaggcgattttaccccaacagaacgtggttttacttgcccaaactgtggcaataatgaccctaaaacagttgatgtggtcaaacgtacatgtggttacttggggaatcctcaggcccgcccaatggttaacggtcgccataaggaaatctctgcgcgtgtaaaacatatgaatggttctactataaaatacccaggcctgtaa

SEQ ID NO: 93 - DNA, 768 bp, Streptococcus pyogenes
atgaggaggaattacagtagagtcattgacgaactgcgtactgactacgggctgaatttagttgctattggtcaacgtttgggtaccgacccccgaacagttggtaaatggtggcagggtaaacataacccgaaccaagaaagcagaaagaaactgaataggctatatagagaggtgaaagaaactatgatgacacaagtaaatatttttgaagaagctaatgacaacacaaagcaggttatgcaagttattacaacgacaaattttcatggacaacctttagacatttacggtgatattcaggagcctttatttttggctagggcagtcgctgaaatgattgattacacaaaaactagccaagggtactatgacgtacaagctatgctaagaaaagtagatgaggatgaaaagcttaaaggaatggctttagaaggtactacgaaaaattttcgtagtggtcaaaaagtttggtttttaactgagcatggactttatgaagtgcttatgcgttcaaacaaaccaaaagccaaagagtttagaaaagcagtcaaaaacattctaaaagaaatccgcttgaatggctattacatgcaaggcgaattggtgcaagaactagctcaaccaagcacccaaaaactaccaggtataagtgacctaacttatatactaaataagctagctgatttagttgatatggataatctagctgatatttcaaatgggattgaccgagttcagcaactagtgaagctgatcagcttgtag

SEQ ID NO: 94 - DNA, 615 bp, Streptococcus pyogenes
atgtttaagaaagaaaatttaaaacaacgttattttaattttggattagtagcgttagctctaacaatattagccatcatttttgccttctcaagtaaaaatgctgatactaagtcttatgctaagaagtcagaaagtaaaatggtaacaatcgacaaggctccaaaaaataatcatgctattactaaagaagaaagcaaagaaaaagcaaagagcattgcttcggagcctattcccacagtagaaaactctgtagctccgacagtaacagaggaagtaccggttgttcagcaagaagtgactcaaactgttcagcaggtatcttcagtagcctataatccaaacaatgtggtactttccaatggaaatactgctggtattgtaggaagtcaagcggcggcacagatggcagcagcaacaggtgttccacaatcaacttgggaacatataattgcgcgtgaatctaatggaaatcctaacgcagctaatgcttctggggcatcagggttgttccagacaatgccaggttggggttctacagcaacggttgaagatcaagtcaatgcagccttgaaagcctatagtgcacaaggtttatcagcttggggttactaa

SEQ ID NO: 95 - DNA, 2577 bp, Streptococcus pyogenes
atgaaaaataataataaatggataattgctggacttgctagttttttgttccctcttagtattatatttatcatccttctatcgatgggcatttattataatagtgataaaacaattctagctagtgatgcttttcatcagtatgttatttttgcgcagaactttcgtaacatcatgcacggttctgatagttttttttatacctttacaagcggactagggataaatttttatgctttaatgtgttattatcttggcagtttcttttctccattacttttcttttttaatttaacctctatgccagatgctatctatttgtttaccttgataaaatttgggttaataggattagctgcatgctattcttttcatagattatatccaaaaatcagtgctttcttgatgatttccatctcagttttttatagcttaatgagcttcttgacaagtcaaatggaactaaattcttggttagatgttttcattcttcttccacttgttatacttggattaaataaacttatcacagaaaataaaaccagaacttattatctttcgatatcattattattcattcaaaattactactttggctacatgattgctcttttttgtattctttacgccttagtttgtcttttacgtctcaatgattttaacaaaatgtttatcgcttttgttaggtttacagctgtgtcaatatgtgctgctttaacaagtgctctagtaatacttcctacctatctagatttgtcaacttatggagagaatctatccccgataaaacagttagttacgaacaatgcttggtttttggatatacctgctaagctctcaataggagtgtacgatactaccaagtttaatgctctgcctatgatttacgtaggattatttcccctaatgcttagtgttatttattttactttagaaagtatccctttaaaaataaaattagccaatgcctgcttgttaacttttattataataagtttttacctacagccacttgatcttttttggcaggggatgcactcaccaaatatgtttttgcatcgctacgcttggtctttttccatagttatcctattactcgcatgtgagactctctctcgactaaaagaagtgactcaaataaaagcaggttttgcttttattttcctcattatactgacatctcttccttatagcttttctcaacaatataattttctacctttaactctttttttacttagtgtttttttattattaggttatactatttcactattttcgtttagaaattctcaaatcccatctacttttatttctgctttcatacttatctttagccttcttgaatcagggttaaacacctactaccagcttcaaggaattaataaggagtggggattcccatcacgacagatatataatagtcaattaaaggatattaacaaccttgtcaactctgtgtcaaaaaatagtcaacctttttttagaatggaaaggctacttccccaaacagggaacgatagcatgaaatttaattattacggcatttcacaattttcctctgtaagaaatagactatctagttctttattggatcgattgggatttcagtctaaaggcacaaatttaaaccttagataccaaaacaatactattattatggacagtctacttggtataaaatataatcttagcgaaggacctccaaataaatttggatttacaaaactaaaaactagcgggaatactactctttatcaaaatcactatagtagccctttagctatattaacacgtaatgtttacaaagatgtcaacctaaatgtcaatacccttgataaccaaaccaaattacttaaccaactaagtgggaaatctttaacctattttaacttacagccagctcaacttatttctggtgctaatcaatttaacggacaaatatctgcacaagcttctgattatcaaaactccgttacccttaattatcaaattaacatccctaaacatagtcaactctatgttagcatacccaatattatattttcaaatcctgatgctaaagagatgcgtattcagacagataatcataatttcatatatactacagataacgcttactctttttttgatttaggatatttcgccgatgccaaagttgctacattttcgtttgtttttccaaaaaataaacaaattagttttaaggaacctcatttttatagtttgtctattgaatcttaccttgaagcaatgaatagcattaaacaaaaaaatgttcatacttacgctaaaagtaatacggtaatcactgattataattcaaaaacgaaaggttctcttatttttacacttccttacgataaaggttggtcagcacaaaaagatgggaaaaatcttccagtcaaaaaagcacaaggaggatttctatcagttactattcctaaaggaaagggacgtgttatccttacctttattcctaatggttttaaattagggttatctctatcttgtgtaggaattatcgcttatatgcttttgtataagtacatagatataaagtctaaattactttag

SEQ ID NO: 96 - DNA, 132 bp, Streptococcus pyogenes
ttttccagatttctgcccacacggagggactattcctcgctatggtcagcctcttgtcgaaatgaacactacaactctcaacaccatcacggagttgggacggtttcgtctaagcagaatccacgaccactt

SEQ ID NO: 97 - DNA, 36 bp, Streptococcus pyogenes
tcgtttatttgggaaaaaagaaaccccgaaggtagc

SEQ ID NO: 98 - DNA, 141 bp, Streptococcus pyogenes
aaggtgaggaaaagacagaagttacaaaagagaagcttttggaattggctagatggattaaagacatctcagacgataccgacgaaaagacagaagatgaggcgtactatgacggagatggaacagaagaaacaaccgttg

SEQ ID NO: 99 - DNA, 96 bp, Streptococcus pyogenes
ctttaccagaagaagcgattaaaaaaatcacagaggctatcaaagttgatgacatcccgtctattaaacaaagctttgatgacctcaaaaatagag

SEQ ID NO: 100 - DNA, 30 bp, Streptococcus pyogenes
tttgttctacaaaaatattccttatggcaa

SEQ ID NO: 101 - DNA, 171 bp, Streptococcus pyogenes
ccaataagtatgcagaaggctatccaggtaatcgctattatggtggaacagaatgtgtggatattgtcgaaacgcttgctattgaacgtgctaagaaacttttcggtgccgcatttgccaatgttcaagcccattccggaagtcaagccaatgcagcagcttatatggcct

SEQ ID NO: 102 - DNA, 105 bp, Streptococcus pyogenes
tttcggaacatcttttgtgactttagttgctgttcctcttttgtatcctgttatcaaaaacttaaaagaaaaggttacaatcggacaagcaaaaagaggtttttg

SEQ ID NO: 103 - DNA, 33 bp, Streptococcus pyogenes
tgggttactgggtgtaaatggtggtttttttgc

SEQ ID NO: 104 - DNA, 144 bp, Streptococcus pyogenes
ctaatgctgaaagccaagaaaaccaattcaaaactcgtaacattgtcccagccaacaaagaagttcaatcttcagaagctgttcaatcaaacgaacttgctaaaaccgttatcactatgggttcttcttcagactacactgtcg

SEQ ID NO: 105 - DNA, 105 bp, Streptococcus pyogenes
ccccgaaatggttggggacgttttgaacgttatgaaagacttggcagaacaaggcatgaccatgttaattgttactcacgaaatgggatttgctcgccaagtagc

SEQ ID NO: 106 - DNA, 105 bp, Streptococcus pyogenes
ttgatgaactgcccatcattgcacttcttgcaacccaagcacaaggaacaacctgtattaaagatgctcaagaattacgagtcaaagaaacagatcgtattcaag

SEQ ID NO: 107 - DNA, 252 bp, Streptococcus pyogenes
aaaacaacgaagtgtaactacctcaaacgtcccaagctggtcgaatccagactacaaagaaccagatttagaagaatttgctctaggaagcatggacggtatagaagatggatcaggagatttttaatttttttaacaaacaaatcaaaaaagattttggtaaaacggcgagtaaagagacttttgctaagtttgctagttactgcgccgaaggaatcgaaaaaaatggagttaagccaatttttaattgga

SEQ ID NO: 108 - DNA, 57 bp, Streptococcus pyogenes
ggcagaagactaccaccaagattacctcaagaaaaatccaaatggctactgccatat

SEQ ID NO: 109 - DNA, 186 bp, Streptococcus pyogenes
ttttggtcgccaggaagcagatattttgttagggacgcaaatgattgccaaaggactggattttccaaatgtgactttagttggggtactaaatgcagatacttccttaaatttgccggattttcgagcgtcagaaaaaacgtttcaattgttaacacaggttgctggtcgggcaggccgtgccca

SEQ ID NO: 110 - DNA, 153 bp, Streptococcus pyogenes
tgcgtgccatcggtgaaatgctctattatgatccagatcaacacacctttatcaattttatttccaaatacattggtccaggctggggttatttttcgggtctatcctattggatttcccttatttttattggaatggcagaaatcacagcag

SEQ ID NO: 111 - DNA, 105 bp, Streptococcus pyogenes
tctgattattttagacatcatgctcccttccttaagtggcttagaagtgctaaaaacaattcgaaagacatcagatgtccctattattatgctaacggcattaga

SEQ ID NO: 112 - DNA, 195 bp, Streptococcus pyogenes
ttactgctgctgaagcagacatcaaagctgaacttgctgctgaaggcaaaccagaaaagatctgggacaaaatcatcccaggtaaaatggaccgcttcatgcttgacaacactaaagttgaccaagcttacactcttcttgcacaagtttacatcatggacgacagcaaaactgttgaagcttaccttgactcag

SEQ ID NO: 113 - DNA, 114 bp, Streptococcus pyogenes
cacctattcgtgaaagacgtttggagtacgctaaagatatgggagaggtgttccgtatgttacaagaaggtagtcaaaaagcaagaactgtggcagccaagactttatcagaag

SEQ ID NO: 114 - DNA, 57 bp, Streptococcus pyogenes
ctgtacgctccacaatctctgtcaaatccttttcttgatagtattccatgtgaccag

SEQ ID NO: 115 - DNA, 183 bp, Streptococcus pyogenes
aacagacgtgacttccttgacaatgtggtaaatcttatcagggtcacggagccacttggcaccagcctcgtttttgacaactttattaacagggcagcccatattaatatcaacaatatcggccttggtattggtttgaatgaaatcagctgcacgtttcaacccttctgcgtcaccaccaaa

SEQ ID NO: 116 - DNA, 54 bp, Streptococcus pyogenes
caagcaccacttgacgatcaccataacaagccaacatattggtcagggtatctt

SEQ ID NO: 117 - DNA, 225 bp, Streptococcus pyogenes
tattttctcaagaaaacacctttgaaggctgcaaaatcttggttgttgtcaccatttggagaaatggctaagacagggtttccttgggcatttttttctaagataaatttgccatctgcatttttaaaggtgccaagtgtgtgtagaccattgtcagaaatcgttttggttgacacattggtctctgaaccaagagtgacaagtcctgtaaagtgtttaccgaca

SEQ ID NO: 118 - DNA, 195 bp, Streptococcus pyogenes
agcaaaaacaaaaggaacaccgataccggttgtaataacggtaaaggcagcaaaagcgtttcccataatcatagtaaaaataaccatgccaagcacataagcgagaacgccaaagaagcggctatcagcaggtacaatctcccgaatgagagaagcaatcacatcaccaacaccagcagctgcaaaaatagctcc

SEQ ID NO: 119 - DNA, 90 bp, Streptococcus pyogenes
ctttttatacatcgatcgcgtttgatattggattttctcgtaatcaatttttccttgtttgtccaaatttacgatgattttttgaatggt

SEQ ID NO: 120 - DNA, 36 bp, Streptococcus pyogenes; identical to SEQ ID NO: 97

SEQ ID NO: 121 - DNA, 150 bp, Streptococcus pyogenes
atcaaacatttgacccaagcaaaacaacggatgccagtatctaaggttctagtagctaaccccttagggtctaaaggaatagctgattcaatccaattgaggatgaaacctttagctgttaagagataccgttcatctctttcaacaagg

SEQ ID NO: 122 - DNA, 150 bp, Streptococcus pyogenes
ccgcctccaccaaatttaccacctgcgtgtaagactgtaaaaactgtttcaacggcgggacgtcctgtcttggcttggatatcaactggaattccacggccatcatctactactgtaatggaattatctgcttcaataaagactttaata

SEQ ID NO: 123 - DNA, 96 bp, Streptococcus pyogenes
gaaaacgagttcaatcagtactatcaagacgcaaaatacaagtcccataaagaacgtcttactatcaatactttcaagagacaaggttatttgagg

SEQ ID NO: 124 - DNA, 111 bp, Streptococcus pyogenes
acaagggtagccccatattttccacaagccttggcaatattttctgagcctgttacattaatagcctcattcaaggcttttccttcgtcttctgctgcatcaactgccgta

SEQ ID NO: 125 - DNA, 243 bp, Streptococcus pyogenes
tcaccttttacaaaatcagttttaacgccttctgcactcaaactttcttcgataaaacgtcctgtaaaaccacccaagaaccctgtcgccgtgctagcaatgtctaaacgttgcaagatgcgactcacattaatgcctttacctccagcaaacttatcatcactcgccatgcgattcactgacccaagatttatttggtcaattctgacaataaagtcaatagaagggtttaaggtcacggta

SEQ ID NO: 126 - DNA, 69 bp, Streptococcus pyogenes
gatcacaatatttattggcattatcaactaaaattgtcacaagttcaaacaatgacttttcctccgctt

SEQ ID NO: 127 - DNA, 63 bp, Streptococcus pyogenes
ccaaatctgctggaccattttctgccaaataacccgcatcaaaaccataaagcaaagctggat

SEQ ID NO: 128 - DNA, 117 bp, Streptococcus pyogenes
caatgtctcataattatcaataatatcaattttcgccataataaaaacactccttcgtgtatcttgaaaagagcgtctctacatgatataatatttcatgcagaaacacttctgtgg

SEQ ID NO: 129 - DNA, 411 bp, Streptococcus pyogenes
gaaaaactcttcagaacggcgcggcaacggtacaacttcaagtgggtttccaaaaagcaaatcatgggtctggtgcttatcgtttttttgaagtcccgcaacaggaatagtgagtccaagttgtttttctatcacatctttggccacattgacttgtccaacgcctccatcaacaataatcaagttaggagcttgcagtccctcctttttcacccgactgtaccttcgaaaaagcacttctctcatactggcataatcatctggtcccaccactgttttaatcttaaatttacgataatctttcttactaggtttgccatcaacaaaaacaaccatagccgcaactggacttgtcccttgaatgttagaattatcaaaggcttcaatgcgcacaggcttgtcaatcctaag

SEQ ID NO: 130 - DNA, 90 bp, Streptococcus pyogenes
gataactgtcgcggatgcctctcgacgaatctcgataacaaaacgcactccttcacggctagattcgtcacgaactgctgtaataccttc

SEQ ID NO: 131 - DNA, 99 bp, Streptococcus pyogenes
ataggttccataaaccaactagtgagcttcgctttagtaacaatggatgaggtaaaaacattatttaaaaccctaataactcctacttttgaggaatgc

SEQ ID NO: 132 - DNA, 117 bp, Streptococcus pyogenes
taccaagtgtgtcagctgcctgagggtgttccccaactgatcgtaaacgcagaccaaacctggttttataaagcaaaaaccaagcaaagaacgaaaaagcaatggcgaagtaaccaa

SEQ ID NO: 133 - DNA, 60 bp, Streptococcus pyogenes
atacttgctaaaatagaaattagccaaaaaacactcataactataataataatgcgctca

SEQ ID NO: 134 - DNA, 138 bp, Streptococcus pyogenes
tttccagatgtcaatgataaggtcattgcgcgtgatagtcggtttttcggtaaagagagaacctgccttttgagcaatcgcttctgggaagtcggtgacaaaaaagttgagaccaaccccaataatgacatcggtgat

SEQ ID NO: 135 - DNA, 135 bp, Streptococcus pyogenes
aaattcaatgttacgcttttgccactctgtcaaaacgagcttgtcatcactttgtttctctttatcttttgccatttacttctccttaatcgcggagctaatatcagctctcaaaaggtcataaaagaagtccgg

SEQ ID NO: 136 - DNA, 171 bp, Streptococcus pyogenes
gagacctctgctttgttagcagctcgcttcatacgctctgcggattctcccaaaataatcatctgcttaagtcctaaaaggtctggcaccaaatcgtcaaattcattgccacgatctagaccgccagcaatcaaaatcaagcgactgttatcaaaacctgataaagctttt

SEQ ID NO: 137 - DNA, 108 bp, Streptococcus pyogenes
aagagactggatgattgcaccctgatattcttctggtgtatcaatttgaacacgctcaaacggttcacatttgacaccatcaatttctttgatgataacttctggacg

SEQ ID NO: 138 - DNA, 135 bp, Streptococcus pyogenes
gaatggctaagtcagcaacactctcatcaatttttacatgataagcgaagctatctggataccgcatttgataaaggtaaatgtacttttcacaaaaagccagttcttcttttaaggtggtcatcttatcttggc

SEQ ID NO: 139 - DNA, 114 bp, Streptococcus pyogenes
catgaccatttgtcacatcaacaatcgttgaagcaacttggaaatcttggtctggatagtaaacataatcaccagaatgataaatattataaagagtctgctgcgcatcgggga

SEQ ID NO: 140 - DNA, 207 bp, Streptococcus pyogenes
gtcatgttaaaagcaccggtcaaattgattttcaagacgcgctcaaaatcctcttccgtcattttaagcatcaatttatcattagtaatgccagcattgttaactaaaacatcaatcgaacctaaactttcgatagcttcattgaccatacgtttagcttctgatgcttctgaaacatccccagagatggtaacaactgtaacgccg

SEQ ID NO: 141 - DNA, 171 bp, Streptococcus pyogenes
agggaattatccagatttagtagctctgcaatcctgctaaaaccactagttaaggtgcctcctaataggacaatggcacctcctaatcctccagctgctccacttcctggtattgtctgtaaatcaatggttgtttggcaaaaaacttttttagcaaagttacttgcaatt

SEQ ID NO: 142 - DNA, 108 bp, Streptococcus pyogenes
gagcactttcaaccaaatcaccaaattgggcaaaaatggaaaaaagagcgaccaaaaccaacatggtcaaaaagtgatgtggcgcataaacagacctatcaatcacca

SEQ ID NO: 143 - DNA, 192 bp, Streptococcus pyogenes
aaatcaaggtctttaaggacttcttcgatcacctcgtccacggttttttcctctccaactattttagtattaagcccatcacttgttaacatctgctcaggcgctttttgttgggattcgggattggcacaccatggacatctcaaggggcaaccttttaaaaaaacggttgtccgaataccaggaccgtca

SEQ ID NO: 144 - DNA, 48 bp, Streptococcus pyogenes
cgaaatgaaatcaacacttcctctcctacgctttcttctaccaaaata

SEQ ID NO: 145 - DNA, 69 bp, Streptococcus pyogenes
tgctccttagcagcttttaccaaattttcaaaatcagccattgttccaaaatcagggttgaccgccgta

SEQ ID NO: 146 - DNA, 138 bp, Streptococcus pyogenes
gaggccatgtcttgccagcgttgctgttcttttttagctgactcttctttgatacgatatgatttggccaagtcctccgtggtcatagctgccatgatttttaaaatggcttggctgtcttgtggaaggaggtgtggg

SEQ ID NO: 147 - DNA, 132 bp, Streptococcus pyogenes
aatttcaaagctcgaccacctggtgttgtttcaggatttccaaacatcacaccaactttttcacgcaattggttaataaagatagcgatagtttttgttttattaatagaagctgataatttacgcatggcc

SEQ ID NO: 148 - DNA, 114 bp, Streptococcus pyogenes
aaagagacctgccactacagccaccaacatcatgtcattttccaagccaagttcgataggaactttttgccacatccagataaaagcggacatcagaactgttccatagatggt

SEQ ID NO: 149 - DNA, 234 bp, Streptococcus pyogenes
attaccctgttgaccaagcaaacgcagcaactgttcaggaagcccagtctttcaaacaatctgttgaagcatctcttggtaaagagaatgtcattgtcaatgttcttgaaacagaaacatcaactcacgaagcccaaggcttctatgctgagaccccagaacaacaagactacgatatcatttcatcatggtggggaccagactatcaagatccacggacctaccttgacatca

SEQ ID NO: 150 - DNA, 60 bp, Streptococcus pyogenes
tcgggaagacaggattcgaacctgcgacaccttggtcccaaaccaagtactctaccaagc

SEQ ID NO: 151 - protein, 428 aa, Streptococcus pyogenes
MRKLLAAMLMTFFLTPLPVISTEKKLIFSKNAVYQLKQDVVQSTQFYNQIPSNPNLYQETCAYKDSDLTLPAGRLGVNQPLLIKSLVLNKESLPVFELADGTYVEANRQLIYDDIVLNQVDIDSYFWTQKKLRLYSAPYVLGTQTIPSSFLFAQKVHATQMAQTNHGTYYLIDDKGWASQEDLVQFDNRMLKVQEMLLQKYNNPNYSIFVKQLNTQTSAGINADKKMYAASISKLAPLYIVQKQLQKKKLAENKTLTYTKDVNHFYGDYDPLGSGKISKIADNKDYRVEDLLKAVAQQSDNVATNILGYYLCHQYDKAFRSEIKALSGIDWDMEQRLLTSRSAANMMEAIYHQKGQIISYLSNTEFDQQRITKNITVPVAHKIGDAYDYKHDVAIVYGNTPFILSIFTNKSTYEDITAIADDVYGILK

SEQ ID NO: 152 - protein, 398 aa, Streptococcus pyogenes
MKKRILSAVLVSGVTLGAATTVGAEDLSTKIAKQDSIISNLTTEQKAAQNQVSALQAQVSSLQSEQDKLTARNTELEALSKRFEQEIKALTSQIVARNEKLKNQARSAYKNNETSGYINALLNSKSISDVVNRLVAINRAVSANAKLLEQQKADKVSLEEKQAANQTAINTIAANMAMAEENQNTLRTQQANLVAATANLALQLASATEDKANLVAQKEAAEKAAAEALAQEQAAKVKAQEQAAQQAASVEAAKSAITPAPQATPAAQSSNAIEPAALTAPAAPSAGPQTSYDSSNTYPVGQCTWGAKSLAPWAGNNWGNGGQWAYSAQAAGYRTGSTPMVGAIAVWNDGGYGHVAVVVEVQSASSIRVMESNYSGRQYIADHRGWFNPTGVTFIYPH

SEQ ID NO: 153 - protein, 1257 aa, Streptococcus pyogenes
MSSYFPVAPLSDLVSYMNKRIFVEKKADFGIKSASLVKELTHNLQLTSLKALRIVQVYDVFNLAEDLLARAEKHIFSEQVTDCLLTETEITAELDKVAFFAIEALPGQFDQRAASSQEALLLFGSDSQVKVNTAQLYLVNKDITEAELEAVKNYLLNPVDSRFKDITLPLEEQAFSVSDKTIPNLDFFETYQADDFATYKAEQGLAMEVDDLLFIQNYFKSIGCVPTETELKVLDTYWSDHCRHTTFETELKNIDFSASKFQKQLQTTYDKYIAMRDELGRSEKPQTLMDMATIFGRYERANGRLDDMEVSDEINACSVEIEVDVDGVKEPWLLMFKNETHNHPTEIEPFGGAATCIGGAIRDPLSGRSYVYQAMRISGAGDITTPIAETRAGKLPQQVISKTAAHGYSSYGNQIGLATTYVREYFHPGFVAKRMELGAVVGAAPKENVVREKPEAGDVVILLGGKTGRDGVGGATGSSKVQTVESVETAGAEVQKGNAIEERKIQRLFRDGNVTRLIKKSNDFGAGGVCVAIGELADGLEIDLDKVPLKYQGLNGTEIAISESQERMSVVVRPNDVDAFIAACNKENIDAVVVATVTEKPNLVMTWNGEIIVDLERRFLDTNGVRVVVDAKVVDKDLTVPEARTTSAETLEADTLKVLSDLNHASQKGLQTIFDSSVGRSTVNHPIGGRYQITPTESSVQKLPVQHGVTTTASVMAQGYNPYIAEWSPYHGAAYAVIEATARLVATGADWSRARFSYQEYFERMDKQAERFGQPVSALLGSIEAQIQLGLPSIGGKDSMSGTFEDLTVPPTLVAFGVTTADSRKVLSPEFKAAGENIYYIPGQAISEDIDFDLIKDNFSQFEAIQAQHKITAASAAKYGGVLESLALMTFGNRIGASVEIAELDSSLTAQLGGFVFTSAEEIADAVKIGQTQADFTVTVNGNDLAGASLLAAFEGKLEEVYPTEFEQTDVLEEVPAVVSDTVIKAKETIEKPVVYIPVFPGTNSEYDSAKAFEQVGASVNLVPFVTLNEVAIAESVDTMVANIAKANIIFFAGGFSAADEPDGSAKFIVNILLNEKVRAAIDSFIEKGGLIIGICNGFQALVKSGLLPYGNFEEAGETSPTLFYNDANQHVAKMVETRIANTNSPWLAGVEVGDIHAIPVSHGEGKLVVSASEFAELRDNGQIWSQYVDFDGQPSMDSKYNPNGSVNAIEGITSKNGQIIGKMGHSERWEDGLFQNIPGNKDQILFASAVKYFTGK

SEQ ID NO: 154 - protein, 374 aa, Streptococcus pyogenes
MKKFHRFLVSGVILLGFNGLVPTMPSTLISQQENLVHAAVLGDNYPSKWKKGNGIDSWNMYIRQCTSFAAFRLSSANGFQLPKGYGNACTWGHIAKNQGYPVNKTPSIGAIAWFDKNAYQSNAAYGHVAWVADIRGDTVTIEEYNYNAGQGPERYHKRQIPKSQVSGYIHFKDLSSQTSHSYPRQLKHISQASFDPSGTYHFTTRLPVKGQTSIDSPDLAYYEAGQSVYYDKVVTAGGYTWLSYLSFSGNRRYIPIKEPAQSVVQNDNTKPSIKVGDTVTFPGVFRVDQLVNNLIVNKELAGGDPTPLNWIDPTPLDETDNQGKVLGDQILRVGEYFIVTGSYKVLKIDQPSNGIYVQIGSRGTWVNADKANKL

SEQ ID NO: 155 - protein, 108 aa, Streptococcus pyogenes
MINQWNNLRHKKLKGFTLLEMLLVILVISVLMLLFVPNLSKQKDRVTETGNAAVVKLVENQAELYELSQGSKPSLSQLKADGSITEKQEKAYQDYYDKHKNEKARLSN

SEQ ID NO: 156 - protein, 256 aa, Streptococcus pyogenes
MKIGIIGVGKMASAIIKGLKQTPHELIISGSSLERSKEIAEQLALPYAMSHQDLIDQVDLVILGIKPQLFETVLKPLHFKQPIISMAAGISLQRLATFVGQDLPLLRIMPNMNAQILQSSTALTGNALVSQELQARVRDLTDSFGSTFDISEKDFDTFTALAGSSPAYIYLFIEALAKAGVKNGIPKAKALEIVTQTVLASASNLKTSSQSPHDFIDAICSPGGTTIAGLMELERLGLTATVSSAIDKTIDKAKSL

SEQ ID NO: 157 - protein, 355 aa, Streptococcus pyogenes
MTDLFSKIKEVTELDGIAGYEHSVRDYLRTKITPLVDRVETDGLGGIFGIRDSKAEKAPRILVAAHMDEVGFMVSDIKVDGTLRVVGIGGWNPLVVSSQRFTLYTRTGQVIPLISGSVPPHFLRGANGSASLPHIEDIVFDGGFTDKAEAERFGITPGDIIIPQSETILTANQKNIISKAWDNRYGVLMITEMLEALKGQDLNNTLIAGANVQEEVGLRGAHVSTTKFDPELFFAVDCSPAGDIYGNPGTIGDGTLLRFYDPGHVMLKDMRDFLLTTAEEAGVNFQYYCGKGGTDAGAAHLQNGGVPSTTIGVCARYIHSHQTLYAMDDFVEAQAFLQAIIKKLDRSTVDLIKCY

SEQ ID NO: 158 - protein, 118 aa, Streptococcus pyogenes
MEDISDPEVILEYGVYPAFIKGYTQLKANIEEALLEMSNSGQALDIYQAVQTLNAENMLLNYYESLPFYLNRQSILANMTKALKDAHIREAMAHYKLGEFAHYQDTMLDMVERTIKTF

SEQ ID NO: 159 - protein, 571 aa, Streptococcus pyogenes
MSNKKTFKKYSRVAGLLTAALIIGNLVTANAESNKQNTASTETTTTNEQPKPESSELTTEKAGQKTDDMLNSNDMIKLAPKEMPLESAEKEEKKSEDKKKSEEDHTEEINDKIYSLNYNELEVLAKNGETIENFVPKEGVKKADKFIVIERKKKNINTTPVDISIIDSVTDRTYPAALQLANKGFTENKPDAVVTKRNPQKIHIDLPGMGDKATVEVNDPTYANVSTAIDNLVNQWHDNYSGGNTLPARTQYTESMVYSKSQIEAALNVNSKILDGTLGIDFKSISKGEKKVMIAAYKQIFYTVSANLPNNPADVFDKSVTFKELQRKGVSNEAPPLFVSNVAYGRTVFVKLETSSKSNDVEAAFSAALKGTDVKTNGKYSDILENSSFTAVVLGGDAAEHNKVVTKDFDVIRNVIKDNATFSRKNPAYPISYTSVFLKNNKIAGVNNRTEYVETTSTEYTSGKINLSHQGAYVAQYEILWDEINYDDKGKEVITKRRWDNNWYSKTSPFSTVIPLGANSRNIRIMARECTGLAWEWWRKVIDERDVKLSKEINVNISGSTLSPYGSITYK

SEQ ID NO: 160 - protein, 142 aa, Streptococcus pyogenes
MKQQSYQPLRFVYLLVALFAALLLIARPVMADEGTNSADAAYYKGQSAGKKAGKKAGKEATWTDLTPTVPTNPETPSDIGETTNKQLYKEGYKDGYKEGYNEGWKSQYPVLTPVKVIWDLISYWLQRLFPNNQSSTAAQSMS

SEQ ID NO: 161 - protein, 108 aa, Streptococcus pyogenes
VKNKLFLVALATVTVLGPSLATPHHQTVHASDVTLTETCDKNGTVCFGYENVDGEVCKLTADGKGTICVGYENRDIKESETSSTKNDCSNWFWCFLNYLWTTIKSWVS

SEQ ID NO: 162 - protein, 398 aa, Streptococcus pyogenes
METILEVKHLSKIFGKKQKAALEMVKTGKNKSEIFKKTGATVGVYDASFEVKKGEIFVIMGLSGSGKSTLVRMLNRLIEPSAGSILLEGKDISTMSADQLREVRRHDINMVFQSFALFPHKTILENTEFGLELRGVPKEERQRLAEKALDNSGLLDFKDQYPNQLSGGMQQRVGLARALANSPKILLMDEAFSALDPLIRREMQDELLDLQDSMKQTIIFISHDLNEALRIGDRIALMKDGQIMQIGTGEEILTNPANDFVREFVEDVDRSKVLTAQNIMIKPLTTTVELDGPQVALNRMHNEEVSMLMATNRRRQLVGSLTADAAIEARKKGLPLSEVIDRDVRTVSKDTIITDILPLIYDSSAPIAVTDDNNRLLGVIIRGRVIEALANISDEDLN

SEQ ID NO: 163 - protein, 594 aa, Streptococcus pyogenes
MKTARFFWFYFKRYRFSFTVIAVAVILATYLQVKAPVFLGESLTELGKIGQAYYVAKMSGQTHFSPDLSAFNAVMFKLLMTYFFTVLANLIYSFLLTRVVSHSTNRMRKGLFGKLERLTVAFFDRHKDGEILSRFTSDLDNIQNSLNQSLIQVVTNIALYIGLVWMMFRQDSRLALLTIASTPVALIFLVINIRLARKYTNIQQQEVSALNAFMDETISGQKAIIVQGVQEDTMTAFLKHNERVRQATFKRRLFSGQLFPVMNGMSLINTAIVIFVGSTIVLSDKSMPAAAALGLVVTFVQYSQQYYQPMMQIASSWGELQLAFTGAHRIQEMFDETEEVRPQNAPAFTSLKEAVAINHVDFGYLPGQKVLSDVSIVAPKGKMIAVVGPTGSGKTTIMNLINRFYDVDAGSITFDGRDIRDYDLDSLRQKVGIVLQESVLFSGTITDNIRFGDQTISQDMVETAARATHIHDFIMSLPKGYNTYVSDDDNVFSTGQKQLISIARTLLTDPEVLILDEATSNVDTVTESKIQRAMEAIVAGRTSFVIAHRLKTILNADHIIVLKDGKVIEQGNHHELLHQKGFYAELYHNQFVFE

SEQ ID NO: 164 - protein, 873 aa, Streptococcus pyogenes
MDLEQTKPNQVKQKIALTSTIALLSASVGVSHQVKADDRASGETKASNTHDDSLPKPETIQEAKATIDAVEKTLSQQKAELTELATALTKTTAEINHLKEQQDNEQKALTSAQEIYTNTLASSEETLLAQGAEHQRELTATETELHNAQADQHSKETALSEQKASISAETTRAQDLVEQVKTSEQNIAKLNAMISNPDAITKAAQTANDNTKALSSELEKAKADLENQKAKVKKQLTEELAAQKAALAEKEAELSRLKSSAPSTQDSIVGNNTMKAPQGYPLEELKKLEASGYIGSASYNNYYKEHADQIIAKASPGNQLNQYQDIPADRNRFVDPDNLTPEVQNELAQFAAHMINSVRRQLGLPPVTVTAGSQEFARLLSTSYKKTHGNTRPSFVYGQPGVSGHYGVGPHDKTIIEDSAGASGLIRNDDNMYENIGAFNDVHTVNGIKRGIYDSIKYMLFTDHLHGNTYGHAINFLRVDKHNPNAPVYLGFSTSNVGSLNEHFVMFPESNIANHQRFNKTPIKAVGSTKDYAQRVGTVSDTIAAIKGKVSSLENRLSAIHQEADIMAAQAKVSQLQGKLASTLKQSDSLNLQVRQLNDTKGSLRTELLAAKAKQAQLEATRDQSLAKLASLKAALHQTEALAEQAAARVTALVAKKAHLQYLRDFKLNPNRLQVIRERIDNTKQDLAKTTSSLLNAQEALAALQAKQSSLEATIATTEHQLTLLKTLANEKEYRHLDEDIATVPDLQVAPPLTGVKPLSYSKIDTTPLVQEMVKETKQLLEASARLAAENTSLVAEALVGQTSEMVASNAIVSKITSSITQPSSKTSYGSGSSTTSNLISDVDESTQRALKAGVVMLAAVGLTGFRFRKESK

SEQ ID NO: 165 - protein, 420 aa, Streptococcus pyogenes
MTKEKLVAFSQAHAEPAWLQERRLAALEAIPNLELPTIERVKFHRWNLGDGTLTENESLASVPDFIAIGDNPKLVQVGTQTVLEQLPMALIDKGVVFSDFYTALEEIPEVIEAHFGQALAFDEDKLAAYHTAYFNSAAVLYVPDHLEITTPIEAIFLQDSDSDVPFNKHVLVIAGKESKFTYLERFESIGNATQKISANISVEVIAQAGSQIKFSAIDRLGPSVTTYISRRGRLEKDANIDWALAVMNEGNVIADFDSDLIGQGSQADLKVVAASSGRQVQGIDTRVTNYGQRTVGHILQHGVILERGTLTFNGIGHILKDAKGADAQQESRVLMLSDQARADANPILLIDENEVTAGHAASIGQVDPEDMYYLMSRGLDQETAERLVIRGFLGAVIAEIPIPSVRQEIIKVLDEKLLNR

SEQ ID NO: 166 - protein, 410 aa, Streptococcus pyogenes
MIKRLISLVVIALFFAASTVSGEEYSVTAKHAIAVDLESGKVLYEKDAKEVVPVASVSKLLTTYLVYKEVSKGKLNWDSPVTISNYPYELTTNYTISNVPLDKRKYTVKELLSALVVNNANSPAIALAEKIGGTEPKFVDKMKKQLRQWGISDAKVVNSTGLTNHFLGANTYPNTEPDDENCFCATDLAIIARHLLLEFPEVLKLSSKSSTIFAGQTIYSYNYMLKGMPCYREGVDGLFVGYSKKAGASFVATSVENQMRVITVVLNADQSHEDDLAIFKTTNQLLQYLLINFQKVQLIENNKPVKTLYVLDSPEKTVKLVAQNSLFFIKPIHTKTKNTVHITKKSSTMIAPLSKGQVLGRATLQDKHLIGQGYLDTPPSINLILQKNISKSFFLKVWWNRFVRYVNTSL

SEQ ID NO: 167 - protein, 308 aa, Streptococcus pyogenes
MESIDKSKFRFVERDSEASEVIDTPAYSYWKSVFRQFFSKKSTVFMLVILVTVLMMSFIYPMFANYDFNDVSNINDFSKRYIWPNAEYWFGTDKNGQSLFDGVWYGARNSILISVIATLINITIGVVLGAIWGVSKAFDKVMIEIYNIISNIPSMLIIIVLTYSLGAGFWNLILAFCITGWIGVAYSIRVQILRYRDLEYNLASQTLGTPMYKIAVKNLLPQLVSVIMTMLSQMLPVYVSSEAFLSFFGIGLPTTTPSLGRFIANYSSNLTTNAYLFWIPLVTLILVSLPLYIVGQNLADASDPRSHR

SEQ ID NO: 168 - protein, 524 aa, Streptococcus pyogenes
LALTDFKDKDQQDQQRSFKEQILAELEKANQIRKEKEEELFQKELEAKEAARRTAQLYAEYKRQDAFQKESIAHNNKTAKHFQAIKGAVMTSEALKPTLLSEKENSSLKTTNKRVVQANELQETASKESQVPLTIEKGHSVRRKLSKRQQTERAAKKISTVLISSIIITLLAVTLAGAGYVYSALNPVDKNSDAFVQVEIPSGSGNKLIGQILQKKGLIKNSTVFSFYTKFKNFTNFQSGYYNLQKSMSLEEIASALQEGGTAEPTKPSLGKILIPEGYTIKQIAKAVEHNSKGKTKKAKTPFNEKDFLDLVTDEAFIQDMVKRYPKLLATIPTKEKAIYRLEGYLFPATYNYYKETTMRELVEDMLAAMDATLVPYYDKIAASGKTVNEVLTLASLVEKEGSTDDDRRQIASVFYNRLNSGMALQSNIAILYAMGKLGEKTTLAEDATIDTTINSPYNIYTNTGLMPGPVASSGVSAIEATLNPASTDYLYFVANVHTGEVYYAKTFEEHSANVEKYVNSQIQ

SEQ ID NO: 169 - protein, 1647 aa, Streptococcus pyogenes
VEKKQRFSLRKYKSGTFSVLIGSVFLVMTTTVAADELSTMSEPTITNHAQQQAQHLTNTELSSAESKSQDTSQITLKTNREKEQSQDLVSEPTTTELADTDAASMANTGSDATQKSASLPPVNTDVHDWVKTKGAWDKGYKGQGKVVAVIDTGIDPAHQSMRISDVSTAKVKSKEDMLARQKAAGINYGSWINDKVVFAHNYVENSDNIKENQFEDFDEDWENFEFDAEAEPKAIKKHKIYRPQSTQAPKETVIKTEETDGSHDIDWTQTDDDTKYESHGMHVTGIVAGNSKEAAATGERFLGIAPEAQVMFMRVFANDIMGSAESLFIKAIEDAVALGADVINLSLGTANGAQLSGSKPLMEAIEKAKKAGVSVVVAAGNERVYGSDHDDPLATNPDYGLVGSPSTGRTPTSVAAINSKWVIQRLMTVKELENRADLNHGKAIYSESVDFKDIKDSLGYDKSHQFAYVKESTDAGYNAQDVKGKIALIERDPNKTYDEMIALAKKHGALGVLIFNNKPGQSNRSMRLTANGMGIPSAFISHEFGKAMSQLNGNGTGSLEFDSVVSKAPSQKGNEMNHFSNWGLTSDGYLKPDITAPGGDIYSTYNDNHYGSQTGTSMASPQIAGASLLVKQYLEKTQPNLPKEKIADIVKNLLMSNAQIHVNPETKTTTSPRQQGAGLLNIDGAVTSGLYVTGKDNYGSISLGNITDTMTFDVTVHNLSNKDKTLRYDTELLTDHVDPQKGRFTLTSHSLKTYQGGEVTVPANGKVTVRVTMDVSQFTKELTKQMPNGYYLEGFVRFRDSQDDQLNRVNIPFVGFKGQFENLAVAEESIYRLKSQGKTGFYFDESGPKDDIYVGKHFTGLVTLGSETNVSTKTISDNGLHTLGTFKNADGKFILEKNAQGNPVLAISPNGDNNQDFAAFKGVFLRKYQGLKASVYHASDKEHKNPLWVSPESFKGDKNFNSDIRFAKSTTLLGTAFSGKSLTGAELPDGHYHYVVSYYPDVVGAKRQEMTFDMILDRQKPVLSQATFDPETNRFKPEPLKDRGLAGVRKDSVFYLERKDNKPYTVTINDSYKYVSVEDNKTFVERQADGSFILPLDKAKLGDFYYMVEDFAGNVAIAKLGDHLPQTLGKTPIKLKLTDGNYQTKETLKDNLEMTQSDTGLVTNQAQLAVVHRNQPQSQLTKMNQDFFISPNEDGNKDFVAFKGLKNNVYNDLTVNVYAKDDHQKQTPIWSSQAGASVSAIESTAWYGITARGSKVMPGDYQYVVTYRDEHGKEHQKQYTISVNDKKPMITQGRFDTINGVDHFTPDKTKALDSSGIVREEVFYLAKKNGRKFDVTEGKDGITVSDNKVYIPKNPDGSYTISKRDGVTLSDYYYLVEDRAGNVSFATLRDLKAVGKDKAVVNFGLDLPVPEDKQIVNFTYLVRDADGKPIENLEYYNNSGNSLILPYGKYTVELLTYDTNAAKLESDKIVSFTLSADNNFQQVTFKITMLATSQITAHFDHLLPEGSRVSLKTAQDQLIPLEQSLYVPKAYGKTVQEGTYEVVVSLPKGYRIEGNTKVNTLPNEVHELSLRLVKVGDASDSTGDHKVMSKNNSQALTASATPTKSTTSATAKALPSTGEKMGLKLRIVGLVLLGLTCVFSRKKSTKD

SEQ ID NO: 170 - protein, 184 aa, Streptococcus pyogenes
MKWSGFMKTKSKRFLNLATLCLALLGTTLLMAHPVQAEVISKRDYMTRFGLGDLEDDSANYPSNLEARYKGYLEGYEKGLKGDDIPERPKIQVPEDVQPSDHGDYRDGYEEGFGEGQHKRDPLETEAEDDSQGGRQEGRQGHQEGADSSDLNVEESDGLSVIDEVVGVIYQAFSTIWTYLSGLF

SEQ ID NO: 171 - protein, 210 aa, Streptococcus pyogenes
MKKTLTLLLALFAIGVTSSVRAEDEQSSTQKPVKFDLDGPQQKIKDYSGNTITLEDLYVGSKVVKIYIPQGWWVYLYRQCDHNSKERGILASPILEKNITKTDPYRQYYTGVPYILNLGEDPLKKGEKLTFSFKGEDGFYVGSYIYRDSDTIKKEKEAEEALQKKEEEKQQKQLEESMLKQIREEDHKPWHQRLSESIQDQWWNFKGLFQ

SEQ ID NO: 172 - protein, 204 aa, Streptococcus pyogenes
MKKTLTLLLALFAIGVTSSVRAEDEQNKFILDGLQEKVKEVSVSDFSVGESKIKVWLPQAWSVKISREHSPKSSISNSGEQKPLSNSSENKEGQFSKRLPYGTQHTIKLSSQLTKGERVTLTFRDEDFWGAGYCFYRDSLSIKEDKQYEEEIKKIEDDLERQDLENDALEMFKKQTEREANKPWHQRLSENIQDQWWNFKGLFQ

SEQ ID NO: 173 - protein, 389 aa, Streptococcus pyogenes
MIITKKSLFVTSVALSLVPLATAQAQEWTPRSVTEIKSELVLVDNVFTYTVKYGDTLSTIAEAMGIDVHVLGDINHIANIDLIFPDTILTANYNQHGQATNLTVQAPASSPASVSHVPSSEPLPQASATSQPTVPMAPPATPSDVPTTPFASAKPDSSVTASSELTSSTNDVSTELSSESQKQPEVPQEAVPTPKAAETTEVEPKTDISEAPTSANRPVPNESASEEVSSAAPAQAPAEKEETSAPAAQKAVADTTSVATSNGLSYAPNHAYNPMNAGLQPQTAAFKEEVASAFGITSFSGYRPGDPGDHGKGLAIDFMVPENSALGDQVAQYAIDHMAERGISYVIWKQRFYAPFASIYGPAYTWNPMPDRGSITENHYDHVHVSFNA

SEQ ID NO: 174 - protein, 331 aa, Streptococcus pyogenes
LRQIQSIRLIDVLELAFGVGYKEETTSQFSSDQPSQVVLYRGEANTVRFAYTNQMSLMKDIRIALDGSDKSLTAQIVPGMGHVYEGFQTSARGIFTMSGVPESTVPVANPNVQTKYIRYFKVIDDMHNTMYKGTVFLVQPQAWKYTMKSVDQLPVDDLNHIGVAGIERMTTLIKNAGALLTTGGSGAFPDNIKVSINPKGRQATITYGDGSTDIIPPAVLWKKGSVKEPTEADQSVGTPTPGIPGKFKRDQSLNEHEAMVNVEPLSHVVKDNIKVIDEKSTGRFEPFRPNEDEKEKPASDVKVRPAEVGSWLEPATALPSVEMSAEDRLKS

SEQ ID NO: 175 - protein, 332 aa, Streptococcus pyogenes
MKVLLYLEAENYLRKSGIGRAIKHQAKALSLVGQHFTTNPRETYDLVHLNTYGLKSWLLMIKAQKAGKKVIMHGHSTEEDFRNSFIFSNLLSPWFKKYLCHFYNKADAIITPTLYSKSLIESYGVKSPIFAVSNGIDLEQYGADPKKEAAFRRYFDIKEGEKVVMGAGLFFLRKGIDDFVKVAQAMPDVRFIWFGETNKWVIPAQVRQMVNGNHPKNLIFPGYIKGDVYEGAMTGADAFFFPSREETEGIVVLEALASRQHLVLRDIPVYYGWVDQSSAELATDIPGFIEALKKVFSGASNKVEAGYKVAQSRRLETVGHALVDVYKKVMEL

SEQ ID NO: 176 - protein, 710 aa, Streptococcus pyogenes
MENNNNHNIAEALSVSLHQIEQVLALTAQGNTIPFIARYRKEVTGNLDEVVIKSIIDMDKSLTTLNERKATILAKIEEQGKLTDQLRTSIEATEKLADLEELYLPYKEKRRTKATIAREAGLFPLARLILQNAQNLETAAEPFVTEGFASPQEALAGAVDILVEAMSEDAKLRSWTYNEIWQYSRLVSTLKDEQLDEKKVFQIYYDFSDQVSNMQGYRTLALNRGEKLGILKVSFEHNLEKMQRFFSVRFKETNPYIEEVINQTIKKKIVPAMERRVRSELSDAAEDGAIHLFSENLRHLLLVSPLKGKMVLGFDPAFRTGAKLAIVDQTGKLLTTQVIYPVAPASQTKIQAAKETLTQLIETYQIDIIAIGNGTASRESEAFVADVLKDFPNTSYVIVNESGASVYSASELARHEFPDLTVEKRSAISIARRLQDPLAELVKIDPKSIGVGQYQHDVSQKKLSENLGFVVDTVVNQVGVNVNTASPSLLAHVSGLNKTISENIVKYREENGALTSRADIKKVPRLGAKAFEQAAGFLRIPGAKNILDNTGVHPESYPAVKELFKVLGIQDLDDAAKATLAAVQVPQMAETLAIGQETLKDIIADLLKPGRDLRDDFEAPILRQDILDLKDLEIGQKLEGTVRNVVDFGAFVDIGVHEDGLIHISEMSKTFVNHPSQVVSVGDLVTVWVSKIDLDRHKVNLSLLPPRDTH

SEQ ID NO: 177 - protein, 433 aa, Streptococcus pyogenes
MNEKVFRDPVHNYIHIDNPLIYDLINTKEFQRLRRIKQVPTTAFTFHGAEHSRFSHCLGVYEIARRVTAIFEEKYADIWNKDESLVTMTAALLHDIGHGAYSHTFEVLFHTDHEAFTQEIITNPETEINAILVRHAPDFPDKVASVINHTYPNKQVVQLISSQIDCDRMDYLLRDSYFSAANYGQFDLMRILRVIRPVEDGIVFEHSGMHAVEDYIVSRFQMYMQVYFHPASRAVELILQNLLKRAQHLYPEQQAYFQKTAPGLIPFFEKKANLADYIALDDGVMNTYFQVWMASEDHILSDLASRFINRKILKSVTFDQDSQGELERLRQLVESVGFDPDYYTGIHINFDLPYDIYRPELENPRTQIEMMQKDGSLAELSQLSPIVKALTGTTYGDRRFYFPKEMLELDDLFAPSKETFMSYISNGHFHFSQ

SEQ ID NO: 178 - protein, 260 aa, Streptococcus pyogenes
MDINLLQALLIGLWTAFCFSGMLLGIYTNRCIILSFGVGIILGDLPTALSMGAISELAYMGFGVGAGGTVPPNPIGPGIFGTLMAITSAGKVTPEAALALSTPIAVAIQFLQTFAYTAFAGAPETAKKQLQKGNIRGFKFAANGTIWAFAFIGLGLGLLGALSMDTLLHLVDYIPPVLLNGLTVAGKMLPAIGFAMILSVMAKKELIPFVLIGYVCAAYLQIPTIGIAIIGIIFALNEFYNKPKQVDATTVQGGQQDDWI

SEQ ID NO: 179 - protein, 403 aa, Streptococcus pyogenes
LTPRSGKTTAGHFRYARYLIESEDENHLVTAYNQEQAYRLFIDGDGTGLMHIFDGNCEIKHDERGDHLLITTPKGNKRVYYKGGGKVNSVGAITGMSLGSVVFCEINLLHMDFIQECFRRTWAAKLRYHLADLNPPAPQHPVIKDVFDVQNTRWTHWTMDDNPILTAERKQNIINSLKKNPYLYKRDVLGQRVMPQGVIYGLFDTEKNVLDALIGEPVEMYFCADGGQSDATSMSCNIVTRVRDNGRISFRLNRVAHYYHSGADTGQVKAMSTYALELKVFIDWCVKKYQMRYTEVFVDPACKSLREELHKLGVFTLGAPNNSKDVSSKAKGIEVGIERGQNIISDGAFYLVNHSEEEYDHYHFLKEIGLYSRDDNGKPIDKDNHAMDEFRYSVNVFVHRYYN

SEQ ID NO: 180 - protein, 497 aa, Streptococcus pyogenes
MKKKPIKLNDEQLLLEASQLSDMYHQLTLDLFDQVIERIKARGSASLADNPYLWQANKLHDVGLLNADNIKLIAKYSGIAEAQLRYIIKNEGFKIYKNTSEQLEEALGRESGVNSTIQDDLSNYARQAIDDVHNLTNTTLPFSVIGAYQGIIQDAVAGVVTGLKTPDQAINQTVIKWFKKGFYGFTDKAGRKWRADSYARTVINTTTWRVFNEAKEAPAREFGIDTFYYSKKATAREMCAPLQHQIVTTGEAREEGGIKILALSDYGHGEPDGCLGINCKHTKTPFVVGVNSKPELPEHLKNITPAQAKANANAQAKQRAIERSIRKSKELLHVAKQLGDKELIRQYQSDVRSKQDALNYLINNNAFLHRNQAREKRYNNPYTKTQSEVEVRKEKAKLDKRRDVESAIIGVETSEGIPLKITKHLAERAVLRNIAPIDIVDSIKEPLKIAPIKYDNLDRPSQKYIGKCVSTVINPIDGNIVTVHATSTRIRKKYGGN

SEQ ID NO: 181 - protein, 628 aa, Streptococcus pyogenes
MSRDPTLILDESNLVIGKDGRVHYTFTTEDDNPKVRLASKCLGTAHFNQLMIERGDQATSYVAPVVVEGTGNPTGLFKDLKEISLELTDTANSQLWSKIKLTNRGMLQEYYDGKIKTEIVNSARGVATRISEDTDKKLALINDTIDGIRREYRDADRKLSASYQAGIEGLKATMANDKIGLQAEIKASAQGLSQKYDDELRKLSAKITTTSSGTTEAYESKLAGLRAEFTRSNQGTRTELESQISGLRAVQQSTASQISQEIRDREGAVSRVQQSLESYQRRMQDAEENYSSLTHTVRGLQSDVGSPTGKIQSRLTQLAGQIEQRVTRDGVMSIISGAGDSIKLAIQKAGGINAKMSGNEIISAINLNSYGVTIAGKHIALDGNTTVNGTFTTKIAEAIKIRADQIIAGTIDAARIRVINLNASSIVGLDANFIKAKIGYAITDLLEGKVIKARNGAMLIDLNTAKMDFNSDATINFNSKNNALVRKDGTHTAFVHFSNATPKGYTGSALYASIGITSSGDGVNSASSGRFAGLRSFRYATGYNHTAAVDQTEIYGDNVLVVDDFNITRGFKFRPDKMQKMLDMNDLYAAVVALGRCWGHLANVGWNTAHSNFTSAVNRELNNYITKI

SEQ ID NO: 182 - protein, 400 aa, Streptococcus pyogenes
MTFLDKIKQGCLDGWAKYKILPSLTAAQAILESGWGKHAPHNALFGIKADSSWTGKSFDTKTQEEYQAGVVTDIVDRFRAYDSWDESIADHGQFLVDNPRYEAVIGETDYKKACYAIKAAGYATASSYVELLIQLIEENDLQSWDREALKNNKEETMTTANEIVQYCVNLANSGMGVDKDGAHGTQCCDLPCFVAKNWFGVDLWGNAIDLLDSASAQGWEVHRMPTEANPKAGATFVQSVPYHQFGHTGIVIEDSDGYTMRTVEQNIDGNPDALYVGAPARFNTRDFTGVIGWFYPPYQGDTVTQPVSTEPQTSDTIVETAKTGTFTLDVAEINIRRWPSLASEVVGIYKQGDTVSFDSEGYANGYYWISYVGGSGMRNYLGIGQTDKDGNRISLWGKLN

SEQ ID NO: 183 - protein, 235 aa, Streptococcus pyogenes
MKKINIIKIVFIITVILISTISPIIKSDSKKDISNVKSDLLYAYTITPYDYKNCRVNFSTTHTLNIDTQKYRGKDYYISSEMSYEASQKFKRDDHVDVFGLFYILNSHTGEYIYGGITPAQNNKVNHKLLGNLFISGESQQNLNNKIILEKDIVTFQEIDFKIRKYLMDNYKIYDATSPYVSGRIEIGTKDGKHEQIDLFDSPNEGTRSDIFAKYKDNRIINMKNFSHFDIYLEK

SEQ ID NO: 184 - protein, 313 aa, Streptococcus pyogenes
MITTFETILDKIKAHQTIIIHRHQNPDPDALGSQAGLKEIIAQNFPDKKVLMTGFDEPSLAWISQMDQVTDKDYKEALVIITDTANRPRIDDERYTLGKCLIKIDHHPNDDVYGDFYYVDTSASSASEIIADFAFSQNLTLSDKAAKLLYTGIVGDTGRFLYASTTSKTLSIASQLRHFEFDFAAISRQMDSFPLKIAKLQSYVFEHLTIDESGAAYVLVSQETLKHFDVTLAESSAIVCAPGKIDNVQAWAIFVELTDGNYRVRMRSKEKIINGIAKRHGGGGHPLASGANSANLEENQAIFRELIAVCQEI

SEQ ID NO: 185 - protein, 650 aa, Streptococcus pyogenes
MIEENKHFEKKMQEYDASQIQVLEGLEAVRMRPGMYIGSTAKEGLHHLVWEIVDNSIDEALAGFASHIKVFIEADNSITVVDDGRGIPVDIQAKTGRPAVETVFTVLHAGGKFGGGGYKVSGGLHGVGSSVVNALSTQLDVRVYKNGQIHYQEFKRGAVVADLEVIGTTDVTGTTVHFTPDPEIFTETTQFDYSVLAKRIQELAFLNRGLKISITDKRSGMEQEEHFLYEGGIGSYVEFLNDKKDVIFETPIYTDGELEGIAVEVAMQYTTSYQETVMSFANNIHTHEGGTHEQGFRAALTRVINDYAKKNKILKENEDNLTGEDVREGLTAVISVKHPNPQFEGQTKTKLGNSEVVKITNRLFSEAFQRFLLENPQVARKIVEKGILASKARIAAKRAREVTRKKSGLEISNLPGKLADCSSNDANQNELFIVEGDSAGGSAKSGRNREFQAILPIRGKILNVEKATMDKILANEEIRSLFTAMGTGFGADFDVSKARYQKLVIMTDADVDGAHIRTLLLTLIYRFMRPVLEAGYVYIAQPPIYGVKVGSEIKEYIQPGIDQEDQLKTALEKYSIGRSKPTVQRYKGLGEMDDHQLWETTMDPENRLMARVTVDDAAEADKVFDMLMGDRVEPRRDFIEENAVYSTLDI

SEQ ID NO: 186 - protein, 2045 aa, Streptococcus pyogenes
MRKVKKVFVSSCMLLTVGLGVAVPTGFSQSNGVMVVKAAEVPATDLSRQASDSERVDESSLLQKENLSVDSFKLENLNGWEAENDTAGNLGKFKDPDSSGYQNILTSSGKNISVAVAPKGSGKMNIKVTKRSNFQGGYYVGGLRTQTPVLKLNDVYRYSFTTKKLSGNSSEFKTRVKPVESNNKLGKELVIRVDNKNVSTKHDWLPDISDGTHTVDFTGLDKKLSVAFRFSPRQTSNVVYEFSNINIKNISPASVPAIPSKVLEGTSVLSGTAISSGDTLEKRKSFDGDILRVYKDSKIIARTVIKGNKWDVKLSKPLIAGEKLDFEILHPRSQNVSKKISKQVEAKPFDPASYKEKVIAKLKPVYEATSEKITNDAWLDENAKDLQKQKLEEQYISGKVAISEAGTKQEAIDAAYNKYSSQTDPDSLPSQYKQGNKENEQEKGRQDLIQTRDLTLKAIQEDKWLTEQEKTIQKEEALKAFETGIESVNQTVSLEQLKQRLIVYKASEKDSEKKEYPESIPNQHIPGKEKEVKAAKQEELKKLHDTTLEKINQDKWLTPDQQAEQLKQAEVTFKKGQEAIKSAQTLTQLETDLADYVSENEGKGNSIPDKYKSGNKDDLVNKAEVKLKEAHEATKQAIEKDPWLSPEQKKAQKEKAKARLDEGLKALKAADSLEILKVTEEAFVDKEKNPDSIPNQHKAGTADQARKQALDSLDKEVQKELESIDNDNTLTTDEKAAAKKKVNDAYDVAKQTAMEANSYEDLTTIKDEFLSNLPHKQGTPLKDQQSDAIAELEKKQQEIEKAIEGDKTLPRDEKEKQIADSKERLKSDTQKVKDAKNADAIKKAFEEGKVNIPQAHIPGDLNKDKEKLLAELKQKADDTEKAIDVDKTLTEDEKKEQKVKTKAELEKAKTDVKNTQTREELDKKVPELKKAIEDTHVKGNLEGVKNKAIEDLKKAHTETVAKINGDDTLDKATKEAQVKEADKALAAGKDAITKADDADKVSTAVTEHTPKIKAAHKTGDLKKAQVDANTALDKAAEKERGEINKDATLTTEDKAKQLKEVETALTKAKDNVKAAKTADAINDARDKGVATIDAVHKAGQDLGARKSGQVAKLEEAAKATKDKISADPTLTSKEKEEQSKAVDAELKKAIEAVNAADTADKVDDALGEGVTDIKNQHKSGDSIDARREAHGKELDRVAQETKGAIEKDPTLTTEEKAKQVKDVDAAKERGMAKLNEAKDADALDKAYGEGVTDIKNQHKSGDPVDARRGLHNKSIDEVAQATKDAITADTTLTEAEKETQRGNVDKEATKAKEELAKAKDADALDKAYGDGVTSIKNQHKSGKGLDVRKDEHKKALEAVAKRVTAEIEADPTLTPEVREQQKAEVQKELELATDKIAEAKDADEADKAYGDGVTAIENAHVIGKGIEARKDLAKKDLAEAAAKTKALIIEDKTLTDDQRKEQLLGVDTEYAKGIENIDAAKDAAGVDKAYSDGVRDILAQYKEGQNLNDRRNAAKEFLLKEADKVTKLINDDPTLTHDQKVDQINKVEQAKLDAIKSVDDAQTADAINDALGKGIENINNQYQHGDGVDVRKATAKGDLEKEAAKVKALIAKDPTLTQADKDKQTAAVDAAKNTAIAAVDKATTTEGINQELGKGITAINKAYRPGEGVKARKEAAKADLEKEAAKVKALITNDPTLTKADKAKQTEAVAKALKAAIAAVDKATTAEGINQELGKGITAINKAYRPGEGVKARKEAAKADLEREAAKVREAIANDPTLTKADKAKQTEAVAKALKAAIAAVDKATTAEGINQELGKGITAINKAYRPGEGVEAHKEAAKANLEKVAKETKALISGDRYLSETEKAVQKQAVEQALAKALGQVEAAKTVEAVKLAENLGTVAIRSAYVAGLAKDTDQATAALNEAKQAAIEALKQAAAETLAKITTDAKLTEAQKAEQSENVSLALKTAIATVRSAQSIASVKEAKDKGITAIRAAYVPNKAVAKSSSANHLPKSGDANSIVLVGLGVMSLLLGMVLYSKKKESKD

SEQ ID NO: 187 - protein, 910 aa, Streptococcus pyogenes
MINKKCIIPVSLLTLAITLTSVEEVTSRQNLTYANEIVTQRPKRESVISDKSNFPVISPYLASVDFGERKTPLPTPDKGVKVTTEQSIAQVRKGPEERPYTVTGKITSVINGWGGYGFYIQDSEGIGLYVYPQKDLGYSKGDIVQLTGTLTRFKGDLQLQQVTAHKKLELSFPTSVKEAVISELETTTPSTLVKLSHVTVGELSTDQYNNTSFLVRDDSGKSIVVHIDHRTGVKGADVVTKISQGDLINLTAILSIVDGQLQLRPFSLEQLEVVKKVTSSNSDASSRNIVKIGEIQGASHTSPLLKKAVTVEQVVVTYLDDSTHFYVQDLNGDGDLATSDGIRVFAKNAKVQVGDVLTISGEVEEFFGRGYEERKQTDLTITQIVAKAVTKTGTAQVPSPLVLGKDRIAPANIIDNDGLRVFDPEEDAIDYWESMEGMLVAVDDAKILGPMKNKEIYVLPGSSTRPLNNSGGVLLPANSYNTDVIPVLFKKGKQIIKAGDSYKGRLAGPVSYSYGNYKVFVDDSKNMPSLMDGHLKPEKTNLQKDLSKLSIASYNIENFSANPSSTKDEKVKRIAESFIHDLNAPDIIGLIEVQDNNGPTDDGTTDATQSAQRLIDAIKKLGGPTYRYVDIAPENNVDGGQPGGNIRTGFLYQPERVSLSDKPKGGARDALTWVNGELNLSVGRIDPTNAAWKDVRKSLAAEFIFQGRKVVVVANHLNSKRGDNALYGCVQPVTFKSEQRRHVLANMLAQFAKEGAKHQANIVMLGDFNDFEFTKTIQLIEEGDMVNLVSRHDISDRYSYFHQGNNQTLDNILVSRHLLDHYEFDMVHVNSPFMEAHGRASDHDPLLLQLSFSKENDKAESSKQSVKAKKTSKGKLLPKTGDSLVYVITLLGTASLLVPILLLTKGKKES

SEQ ID NO: 188 - protein, 1210 aa, Streptococcus pyogenes
VISFAPFLSPEAIKHLQENERCRDQSQKRTAQQIEAIYTSGQNILVSASAGSGKTFVMVERILDKILRGVSIDRLFISTFTVKAATELRERIENKLYSQIAQTTDFQMKVYLTEQLQSLCQADIGTMDAFAQKVVSRYGYSIGISSQFRIMQDKAEQDVLKQEVFSKLFNEFMNQKEAPVFRALVKNFSGNCKDTSAFRELVYTCYSFSQSTENPKIWLQENFLSAAKTYQRLEDIPDHDIELLLLAMQDTANQLRDVTDMEDYGQLTKAGSRSAKYTKHLTIIEKLSDWVRDFKCLYGKAGLDRLIRDVTGLIPSGNDVTVSKVKYPVFKTLHQKLKQFRHLETILMYQKDCFSLLEQLQDFVLAFSEAYLAVKIQESAFEFSDIAHFAIKILEENTDIRQSYQQHYHEVMVDEYQDNNHMQERLLTLLSNGHNRFMVGDIKQSIYRFRQADPQIFNQKFRDYQKKPEQGKVILLKENFRSQSEVLNVSNAVFSHLMDESVGDVLYDEQHQLIAGSHAQTVPYLDRRAQLLLYNSDKDDGNAPSDSEGISFSEVTIVAKEIIKLHNDKGVPFEDITLLVSSRTRNDIISHTFNQYGIPIATDGGQQNYLKSVEVMVMLDTLRTINNPRNDYALVALLRSPMFAFDEDDLARIALQKDNELDKDCLYDKIQRAVIGRGAHPELIHDTLLGKLNVFLKTLKSWRRYAKLGSLYDLIWKIFNDRFYFDFVASQAKAEQAQANLYALALRANQFEKSGYKGLYRFIKMIDKVLETQNDLADVEVATPKQAVNLMTIHKSKGLQFPYVFILNCDKRFSMTDIHKSFILNRQHGIGIKYLADIKGLLGETTLNSVKVSMETLPYQLNKQELRLATLSEEMRLLYVAMTRAEKKVYFIGKASKSKSQEITDPKKLGKLLPLALREQLLTFQDWLLAIADIFSTEDLYFDVRFIEDSDLTQESVGRLQTPQLLNPDDLKDNRQSETIARALDMLEAVSQLNANYEAAIHLPTVRTPSQLKATYEPLLEPIGVDIIEKSSRSLSDFTLPHFSKKAKVEASHIGSALHQLMQVLPLSKPINQQTLLDALRGIDSNEEVKTALDLKKIESFFCDTSLGQFFQTYQKHLYREAPFAILKLDPISQEEYVLRGIIDAYFLFDDHIVLVDYKTDKYKQPIELKKRYQQQLELYAEALTQTYKLPVTKRYLVLMGGGKPEIVEV

SEQ ID NO: 189 - protein, 253 aa, Streptococcus pyogenes
MVKTDFKLRYQGSAIGYLWSILKPLMMFTIMYLVFIRFLRLGGNVPHFPVALLLANVIWSFFSEATSMGMVSIVSRGDLLRKLNFSKHIIVFSAVLGALINFLINLVVVLIFALINGVTISGYAYLSLFLFIELVVLVLGIALLLSNVFVYYRDLAQVWEVLLQAGMYATPIIYPITFVLDSHPLAAKLLMLNPVAQMIQDFRYLLIDRANVTIWQMSTNWFYIVIPYLVPFVILFIGIFVFKKNADRFAEII

SEQ ID NO: 190 - protein, 577 aa, Streptococcus pyogenes
MTFLSDLISLMTKIRLSWVIKAGIFQLLFVTIANIVLSEFFYFILDVTGQYHLDKDNVVTFLKNPIALALLGAYLFLLAAFIHLEFFALYRIIADQEISFYLFRKQFSYYLRGLWKTFSGYQLLLFLLYILLTIPVLHIGLSSVITQKLYLPEFIVGELSKITSTKYLLYGSLILVFYLNLRLVYFLPLIAINHRTVAQAWRESWQKTKKKHVLLWMKLFAINGLTIVVLSLAISMILIFVDMFNPKGNNIIVQLGALTFTWELIFFTTIFFKLCSAMILKEAIEPQKQYDEPRRSNKAYVVIFIVVTVGFAYQSLERLTFFDTSHSKTVIAHRGLVSAGVENSLEALEGAKKAGSDYVELDLILTKDNHFVVSHDNRLKRLAGVNKTIRNLTLKEVEHLTSHQGHFSGRFVSFDTFYQKAKKLNMPLLIELKPIGTEPGNYVDLFLETYHRLGISKDNKVMSLDLEVIEAIKKKNPSITTGYIIPIQFGFFGDEFVDFYVIEDFSYRSYLSSQAFWNNKEIYVWTINDPKRIEHYLLKPIQGIITDQPALTNQLIKDLKQDNSYFSRLVRIISSLY

SEQ ID NO: 191 - protein, 1008 aa, Streptococcus pyogenes
MKKHLKTVALTLTTVSVVTHNQEVFSLVKEPILKQTQASSSISGADYAESSGKSKLKINETSGPVDDTVTDLFSDKRTTPEKIKDNLAKGPREQELKAVTENTESEKQITSGSQLEQSKESLSLNKTVPSTSNWEICDFITKGNTLVGLSKSGVEKLSQTDHLVLPSQAADGTQLIQVASFAFTPDKKTAIAEYTSRAGENGEISQLDVDGKEIINEGEVFNSYLLKKVTIPTGYKHIGQDAFVDNKNIAEVNLPESLETISDYAFAHLALKQIDLPDNLKAIGELAFFDNQITGKLSLPRQLMRLAERAFKSNHIKTIEFRGNSLKVIGEASFQDNDLSQLMLPDGLEKIESEAFTGNPGDDHYNNRVVLWTKSGKNPSGLATENTYVNPDKSLWQESPEIDYTKWLEEDFTYQKNSVTGFSNKGLQKVKRNKNLEIPKQHNGVTITEIGDNAFRNVDFQNKTLRKYDLEEVKLPSTIRKIGAFAFQSNNLKSFEASDDLEEIKEGAFMNNRIETLELKDKLVTIGDAAFHINHIYAIVLPESVQEIGRSAFRQNGANNLIFMGSKVKTLGEMAFLSNRLEHLDLSEQKQLTEIPVQAFSDNALKEVLLPASLKTIREEAFKKNHLKQLEVASALSHIAFNALDDNDGDEQFDNKVVVKTHHNSYALADGEHFIVDPDKLSSTIVDLEKILKLIEGLDYSTLRQTTQTQFRDMTTAGKALLSKSNLRQGEKQKFLQEAQFFLGRVDLDKAIAKAEKALVTKKATKNGQLLERSINKAVLAYNNSAIKKANVKRLEKELDLLTGLVEGKGPLAQATMVQGVYLLKTPLPLPEYYIGLNVYFDKSGKLIYALDMSDTIGEGQKDAYGNPILNVDEDNEGYHALAVATLADYEGLDIKTILNSKLSQLTSIRQVPTAAYHRAGIFQAIQNAAAEAEQLLPKPGTHSEKSSSSESANSKDRGLQSNPKTNRGRHSAILPRTGSKGSFVYGILGYTSVALLSLITAIKKKKY

SEQ ID NO: 192 - protein, 670 aa, Streptococcus pyogenes
MKKYFILKSSVLSILTSFTLLVTDVQADQVDVQFLGVNDFHGALDNTGTAYTPSGKIPNAGTAAQLGAYMDDAEIDFKQANQDGTSIRVQAGDMVGASPANSALLQDEPTVKVFNKMKFEYGTLGNHEFDEGLDEFNRIMTGQAPDPESTINDITKQYEHEASHQTIVIANVIDKKTKDIPYGWKPYAIKDIAINDKIVKIGFIGVVTTEIPNLVLKQNYEHYQFLDVAETIAKYAKELQEQHVHAIVVLAHVPATSKDGVVDHEMATVMEKVNQIYPEHSIDIIFAGHNHQYTNGTIGKTRIVQALSQGKAYADVRGTLDTDTNDFIKTPSANVVAVAPGIKTENSDIKAIINHANDIVKTVTERKIGTATNSSTISKTENIDKESPVGNLATTAQLTIAKKTFPTVDFAMTNNGGIRSDLVVKNDRTITWGAAQAVQPFGNILQVIQMTGQHIYDVLNQQYDENQTYFLQMSGLTYTYTDNDPKNSDTPFKIVKVYKDNGEEINLTTTYTVVVNDFLYGGGDGFSAFKKAKLIGAINTDTEAFITYITNLEASGKTVNATIKGVKNYVTSNLESSTKVNSAGKHSIISKVFRNRDGNTVSSEVISDLLTSTENTNNSLGKKETTTNKNTISSSTLPITGDNYKMSPIMTILALISLGGLNAFIKKRKS

SEQ ID NO: 193 - protein, 262 aa, Streptococcus pyogenes
MTNNQTLDILLDVYAYNHAFRIAKALPNIPKTALYLLEMLKERRELNLAFLAEHAAENRTIEDQYHCSLWLNQSLEDEQIANYILDLEVKVKNGAIIDFVRSVSPILYRLFLRLITSEIPNFKAYIFDTKNDQYDTWHFQAMLESDHEVFKAYLSQKQSRNVTTKSLADMLTLTSLPQEIKDLVFLLRHFEKAVRNPLAHLIKPFDEEELHRTTHFSSQAFLENIITLATFSGVIYRREPFYFDDMNAIIKKELSLWRQSIV

SEQ ID NO: 194 - protein, 429 aa, Streptococcus pyogenes
MKTTSLIKVDLPSTIGIGYGAFWRSRNFYRVVKGSRGSKKSKTTALNFIVRLLKYPWANLLVIRRYSNTNKQSTYTDFKWACNQLKVTHLFKFNESLPEITVKATGQKILFRGLDDELKITSITVDVGALCWAWFEEAYQIETEDKFSTVVESIRGSLDAPDFFKQITVTFNPWSERHWLKRVFFDEETKRADTFSGTTTFRVNEWLDDVDKRRYEDLYKTNPRRARIVCDGEWGVAEGLVFDNFEVVDFDVEKTIQRVKETSAGMDFGFTQDPTTLICVAVDLANKELWLYNEHYQKAMLTDHIVKMIRDKNLHRSYIAGDSAEKRLIAEIKSKGVSGIVPSIKGKGSIMQGIQFMQGFKIYIHPSCEHTIEEFNTYTFKQDKEGNWLNEPIDKNNHVIDAIRYALEKYHIRSNESNQFEVLRAGFGY

SEQ ID NO: 195 - protein, 177 aa, Streptococcus pyogenes
MAEETQTVETVEEQVVPEAKQPQDEKKYTDADVDAIIDKKFAKWKSEQEAEKSEAKKMAKMNEKEKADYEKQKLLDELQELKNDKTRNELTAVARQMFAESEINVNDDVLGLVVTLDAEQTKANVTTLANAFAKVIADDRKALVRQTTPSTGGGLSKQTNYGANLASKAAQQSTKLF

SEQ ID NO: 196 - protein, 236 aa, Streptococcus pyogenes
MRYNCRYSHIDKKIYSMIICLSFLLYSNVVQANSYNTTNRHNLESLYKHDSNLIEADSIKNSPDIVTSHMLKYSVKDKNLSVFFEKDWISQEFKDKEVDIYALSAQEVCECPGKRYEAFGGITLTNSEKKEIKVPVNVWDKSKQQPPMFITVNKPKVTAQEVDIKVRKLLIKKYDIYNNREQKYSKGTVTLDLNSGKDIVFDLYYFGNGDFNSMLKIYSNNERIDSTQFHVDVSIS

SEQ ID NO: 197 - protein, 805 aa, Streptococcus pyogenes
VNTYFCTHHKQLLLYSNLFLSFAMMGQGTAIYADTLTSNSEPNNTYFQTQTLTTTDSEKKVVQPQQKDYYTELLDQWNSIIAGNDAYDKTNPDMVTFHNKAEKDAQNIIKSYQGPDHENRTYLWEHAKDYSASANITKTYRNIEKIAKQITNPESCYYQDSKAIAIVKDGMAFMYEHAYNLDRENHQTTGKENKENWWVYEIGTPRAINNTLSLMYPYFTQEEILKYTAPIEKFVPDPTRFRVRAANFSPFEANSGNLIDMGRVKLISGILRKDDLEISDTIKAIEKVFTLVDEGNGFYQDGSLIDHVVTNAQSPLYKKGIAYTGAYGNVLIDGLSQLIPIIQKTKSPIKADKMATIYHWINHSFFPIIVRGEMMDMTRGRSISRFNAQSHVAGIEALRAILRIADMSEEPHRLALKTRIKTLVTQGNAFYNVYDNLKTYHDIKLMKELLSDTSVPVQKLDSYVASFNSMDKLALYNNKHDFAFGLSMFSNRTQNYEAMNNENLHGWFTSDGMFYLYNNDLGHYSENYWATVNPYRLPGTTETEQKPLEGTPENIKTNYQQVGMTGLSDDAFVASKKLNNTSALAAMTFTNWNKSLTLNKGWFILGNKIIFVGSNIKNQSSHKAYTTIEQRKENQKYPYCSYVNNQPVDLNNQLVDFTNTKSIFLESDDPAQNIGYYFFKPTTLSISKALQTGKWQNIKADDKSPEAIKEVSNTFITIMQNHTQDGDRYAYMMLPNMTRQEFETYISKLDIDLLENNDKLAAVYDHDSQQMHVIHYGKKATMFSNHNLSHQGFYSFPHPVRQNQQ

SEQ ID NO: 198 - protein, 293 aa, Streptococcus pyogenes
LLTFGGASAVKAEENEKVREQEKLIQQLSEKLVEINDLQTLNGDKESIQSLVDYLTRRGKLEEEWMEYLNSGIQRKLFVGPKGPAGEKGEQGPTGKQGERGETGPAGPRGDKGETGDKGAQGPVGPAGKDGQNGKDGLPGKDGKDGQNGKDGLPGKDGKDGQDGKDGLPGKDGKDGQNGKDGLPGKDGQPGKPAPKTPEVPQNPDTAPHTPKTPRIPGQSKDVTPAPQNPSNRGLNKPQTQGGNQLAKTPAAHDTHRQLPATGETTNPFFTAAAVAIMTTAGVVAVAKRQENN

SEQ ID NO: 199 - protein, 323 aa, Streptococcus pyogenes
MYIFSSSKKDSAKELVILTPNSQTILTGTIPAFEEKYGVKVRLIQGGTGQLIDQLGRKDKPLNADIFFGGNYTQFESHKDLFESYVSPQVSTVISDYQLPSHRATPYTINGSVLIVNNELARGLHITSYEDLLQPALKGKIAFADPNSSSSAFSQLTNILLAKGGYTNADAWAYMKRLLVNMNSIRATSSSEVYQSVAEGKMIVGLTYEDPCINLQKSGANVSIVYPKEGTVFVPSSVAIIKHAPNMTEAKLFINFMLSRDVQNAFGQSTSNRPIRQDAQTSHDMKALETIATLKEDYAYVTKHKKKIVATYNQLRQRLEKAK

SEQ ID NO: 200 - protein, 263 aa, Streptococcus pyogenes
MPTSIKAIKESLEAVTSLLDPLFQELATDTRSGVQKALKSRQKVIQAELAEEERLEAMLSYEKALYKKGYKAIAGIDEVGRGPLAGPVVAACVILPKYCKIKGLNDSKKIPKAKHETIYQAVKEKALAIGIGIIDNQLIDEVNIYEATKLAMLEAIKQLEGQLTQPDYLLIDAMTLDIAISQQSILKGDANSLSIAAASIVAKVTRDQMMANYDRIFPGYDFAKNAGYGTKEHLQGLKAYGITPIHRKSFEPVKSMCCDSTNP

SEQ ID NO: 201 - protein, 521 aa, Streptococcus pyogenes
MTVKEETMSILEVKQLSHGFGDRAIFENVSFRLLKGEHIGLVGANGEGKSTFMSIVTGHLQPDEGKVEWSKYVTAGYLDQHTVLESGQTVRDVLRTAFDELFKTENRINEIYASMADDKADIAVLMEEVGELQDRLESRDFYTLDAKIDEVARALGVMDFGMESDVTSLSGGQRTKVLLAKLLLEKPDILLLDEPTNHLDAEHIEWLKRYLQHYENAFVLISHDISFLNDVINIVYHVENQSLVRYTGDYYQFQAVYEMKQSQLEAAYERQQKEIANLQDFVNRNKARVATRNMAMSRQKKLDKMDIIELQAEKPKPNFEFKQARTPSRFIFQTKNLVIGYDYPLTKEPLNITFERNQKIAIVGANGIGKSTLLKSLLGVIEPLEGHIVTGDFLEVGYFEQEVTGVNRQTPLEVVWDAFPALNQAEVRAALARCGLTSKHIESQIQVLSGGEQAKVRFCLLMNRENNVLILDEPTNHLDIDAKNELKRALKAYKGSILMVCHEPDFYNGWVTDTWDFSKLT

SEQ ID NO: 202 - protein, 350 aa, Streptococcus pyogenes
MNKKFIGLGLASVAVLSLAACGNRGASKGGASGKTDLKVAMVTDTGGVDDKSFNQSAWEGLQSWGKEMGLQKGTGFDYFQSTSESEYATNLDTAVSGGYQLIYGIGFALKDAIAKAAGDNEGVKFVIIDDIIEGKDNVASVTFADHEAAYLAGIAAAKTTKTKTVGFVGGMEGTVITRFEKGFEAGVKSVDDTIQVKVDYAGSFGDAAKGKTIAAAQYAAGADVIYQAAGGTGAGVFNEAKAINEKRSEADKVWVIGVDRDQKDEGKYTSKDGKEANFVLASSIKEVGKAVQLINKQVADKKFPGGKTTVYGLKDGGVEIATTNVSKEAVKAIKEAKAKIKSGDIKVPEK

SEQ ID NO: 203 - protein, 288 aa, Streptococcus pyogenes
MKMKKKFFLLSLLALSTFFLSACSSWIDKGESITAVGSTALQPLVEAVADEFGSSNLGKTVNVQGGGSGTGLSQVQSGAVQIGNSDVFAEEKDGIDASKLVDHQVAVAGLAVIANPKVKVSNLSSQQLQKIFSGEYTNWKQVGGEDLAISVINRAASSGSRATFDSVIMKGVNAKQSQEQDSNGMVKSIVSQTPGAISYLSFAYVDSSVKSLQLNGFKANAKNVATNDWPIWSYEHMYTKDKPTGLTKEFLDYMFSDEVQQNIVTHMGYISINDMEVVKSHDGKVTKR

SEQ ID NO: 204 - protein, 724 aa, Streptococcus pyogenes
MTHKIKVLLLAIMSIFLTCNIASAETIAIVSDTAYAPFEFKDSDQIYKGIDVDIINEVAKRQSWDFSMSFPGFDAAVNAVQSGQASALMAGTTITNARKKVFHFSEPYYDTKIVIATRKANAIKKYSDLKGKTVGVKNGTAAQAFLNNYKKKYDYTVKTFDTGDLMYNSLSAGSIAAVMDDEAVIQYAISQNQDIAINMKGEPIGSFGFAVKKGSGYDYLVNDFNTALKAMKADGTYQAIMTKWLGTDDKATTSQATGNPSAKATPTKDSYKIVSDSSFAPFEFQNGKGKYVGIDIELIKAIAKQQGFKIEIANPGFDAALNAVQSSQADGVIAGATITDARKAIFDFSDPYYTSNIILAVKAGKNIKNYEDLDRKTVGAKNGTSSYSWLKENAPKYGYNVKAFDDGSSMYDSLNSGSVDAIMDDEAVLKYAISQGRRFETPLEGISTGEVGFAVKKGTNPELIEMFNNGLAALKKSGQYDDIIDKYLDSKKAATPSEKGADESTISGLLSNNYKQLLAGLGTTLSLTLISFAIAIIIGIIFGMMAVSPTKSLRLISTVFVDVVRGIPLMIVAAFIFWGVPNLIESMTGHQSPINDFLAATIALSLNGGAYIAEIVRGGIEAVPAGQMEASRSLGLSYGTTMRKVILPQAVKLMLPNFINQFVISLKDTTIVSAIGLVELFQTGKIIIARNYQSFRMYAILAIIYLIMIILLTRLAKRLEKRLN

SEQ ID NO: 205 - protein, 217 aa, Streptococcus pyogenes
MGKEIKVKCFLRRSAFGLVAVSASVLVGSTVSAVDSPIEQPRIIPNGGTLTNLLGNAPEKLALRNEERAIDELKKQAIEDKEATTAIEAASSDALEALADQTDALQSEEAAVVKADNAASDALEALADQTDALQSEEAEVVQSDNAASDAWEKAATPIALDVKKTKDTKPVVKKEERQNVNTLPTTGEESNPFFTAAALAIMVSTGVLVVSSKCKEN

SEQ ID NO: 206 - protein, 792 aa, Streptococcus pyogenes
MKTKKVIILVGLLLSSQLTLIACQSRGNGTYPIKTKQSRKGMTSNKIKPIKKSKKTNKTHKGVAGVDFPTDDGFILTKDSKILSKTDQGIVVDHDGHSHFIFYADLKGSPFEYLIPKGASLAKPAVAQRAASQGTSKVADPHHHYEFNPADIVAEDALGYTVRHDDHFHYILKSSLSGQTQAQAKQVATRLPQTSSLVSTATANGIPGLHFPTSDGFQFNGQGIVGVTKDSILVDHDGHLHPISFADLRQGGWAHVADQYDPAKKAEKPAETHQTPELSEREKEYQEKLAYLAEKLGIDPSTIKRVETQDGKLGLEYPHHDHAHVLMLSDIEIGKDIPDPHAIEHARELEKHKVGMDTLRALGFDEEVILDIVRTHDAPTPFPSNEKDPNMMKEWLATVIKLDLGSRKDPLQRKGLSLLPNLETLGIGFTPIKDISPVLQFKKLKQLLMTKTGVTDYRFLDNMPQLEGIDISQNNLKDISFLSKYKNLTLVAAADNGIEDIRPLGQLPNLKFLVLSNNKISDLSPLASLHQLQELHIDNNQITDLSPVSHKESLTVVDLSRNADVDLATLQAPKLETLMVNDTKVSHLDFLKNNPNLSSLSINRAQLQSLEGIEASSVIVRVEAEGNQIKSLVLKDKQGSLTFLDVTGNQLTSLEGVNNFTALDILSVSKNQLTNVNLSKPNKTVTNIDISHNNISLADLKLNEQHIPEAIAKNFPAVYEGSMVGNGTAEEKAAMATKAKESAQEASESHDYNHNHTYEDEEGHAHEHRDKDDHDHEHEDENEAKDEQNHAD

SEQ ID NO: 207 - protein, 475 aa, Streptococcus pyogenes
LAKQYKNLVNGEWKLSENEITIYAPATGEELGSVPAMTQAEVDAVYASAKKALSDWRALSYVERAAYLHKAADILVRDAEKIGAILSKEVAKGHKAAVSEVIRTAEIINYAAEEGLRMEGEVLEGGSFEAASKKKIAIVRREPVGLVLAISPFNYPVNLAGSKIAPALIAGNVVALKPPTQGSISGLLLAEAFAEAGIPAGVFNTITGRGSVIGDYIVEHEAVSFINFTGSTPIGEGIGKLAGMRPIMLELGGKDSAIVLEDADLALAAKNIVAGAFGYSGQRCTAVKRVLVMDKVADQLAAEIKTLVEKLSVGMPEDDADITPLIDTSAADFVEGLIKDATDKGATALTAFNREGNLISPVLFDHVTTDMRLAWEEPFGPVLPIIRVTTVEEAIKISNESEYGLQASIFTTNFPKAFGIAEQLEVGTVHLNNKTQRGTDNFPFLGAKKSGAGVQGVKYSIEAMTTVKSVVFDIQ

SEQ ID NO: 208 - protein, 719 aa, Streptococcus pyogenes
MSLKDLGDISYFRLNNEINRPVNGKIPLHKDKEALKAFSAENVLPNTMSFTSITEKIEYLISNDYIESAFIQKYRPEFITELDSIIKSENFRFKSFMAAYKFYQQYALKTNDGEHYLENLEDRVLFNALYFADGQEDLAKDLAVEMINQRYQPATPSFLNAGRSRRGELVSCFLIQVTDDMNSIGRSINSALQLSRIGGGVGITLSNLREAGAPIKGYAGAASGVVPVMKLFEDSFSYSNQLGQRQGAGVVYLNVFHPDIIAFLSTKKENADEKVRVKTLSLGITVPDKFYELARKNEDMYLFSPYNVEKEYGIPFNYLDITNMYDELVANPKITKTKIKARDLETEISKLQQESGYPYIINIDTANKANPIDGKIIMSNLCSEILQVQTPSLINDAQEFVEMGTDISCNLGSTNILNMMTSPDFGRSIKTMTRALTFVTDSSSIEAVPTIKHGNSQAHTFGLGAMGLHSYLAQHHIEYGSPESIEFTDIYFMLLNYWTLVESNNIARERQTTFVGFENSKYANGSYFDKYVTGHFVPKSDLVKDLFKDHFIPQASDWEALRDAVQKDGLYHQNRLAVAPNGSISYINDCSASIHPITQRIEERQEKKIGKIYYPANGLSTDTIPYYTSAYDMDMRKVIDVYAAATEHVDQGLSLTLFLRSELPMELYEWKTQSKQTTRDLSILRNYAFNKGIKSIYYIRTFTDDGEEVGANQCESCVI

SEQ ID NO: 209 - protein, 872 aa, Streptococcus pyogenes
MKELSSAQIRQMWLDFWKSKGHCVEPSANLVPVNDPTLLWINSGVATLKKYFDGSVIPENPRITNAQKSIRTNDIENVGKTARHHTMFEMLGNFSIGDYFRDEAIEWGFELLTSPDWFDFPKDKLYMTYYPDDKDSYNRWIACGVEPSHLVPIEDNFWEIGAGPSGPDTEIFFDRGEDFDPENIGLRLLAEDIENDRYIEIWNIVLSQFNADPAVPRSEYKELPNKNIDTGAGLERLAAVMQGAKTNFETDLFMPIIREVEKLSGKTYDPDGDNMSFKVIADHIRALSFAIGDGALPGNEGRGYVLRRLLRRAVMHGRRLGINETFLYKLVPTVGQIMESYYPEVLEKRDFIEKIVKREEETFARTIDAGSGHLDSLLAQLKAEGKDTLEGKDIFKLYDTYGFPVELTEELAEDAGYKIDHEGFKSAMKEQQDRARAAVVKGGSMGMQNETLAGIVEESRFEYDTYSLESSLSVIIADNERTEAVSEGQALLVFAQTPFYAEMGGQVADTGRIKNDKGDTVAEVVDVQKAPNGQPLHTVNVLASLSVGTNYTLEINKERRLAVEKNHTATHLLHAALHNVIGEHATQAGSLNEEEFLRFDFTHFEAVSNEELRHIEQEVNEQIWNALTITTTETDVETAKEMGAMALFGEKYGKVVRVVQIGNYSVELCGGTHLNNSSEIGLFKIVKEEGIGSGTRRIIAVTGRQAFEAYRNQEDALKEIAATVKAPQLKDAAAKVQALSDSLRDLQKENAELKEKAAAAAAGDVFKDVQEAKGVRFIASQVDVADAGALRTFADNWKQKDYSDVLVLVAAIGEKVNVLVASKTKDVHAGNMIKELAPIVAGRGGGKPDMAMAGGSDASKIAELLAAVAEIV

SEQ ID NO: 210 - protein, 351 aa, Streptococcus pyogenes
MKNSNKLIASVVTLASVMALAACQSTNDNTKVISMKGDTISVSDFYNETKNTEVSQKAMLNLVISRVFEAQYGDKVSKKEVEKAYHKTAEQYGASFSAALAQSSLTPETFKRQIRSSKLVEYAVKEAAKKELTTQEYKKAYESYTPTMAVEMITLDNEETAKSVLEELKAEGADFTAIAKEKTTTPEKKVTYKFDSGATNVPTDVVKAASSLNEGGISDVISVLDPTSYQKKFYIVKVTKKAEKKSDWQEYKKRLKAIIIAEKSKDMNFQNKVIANALDKANVKIKDKAFANILAQYANLGQKTKAASESSTTSESSKAAEENPSESEQTQTSSAEEPTETEAQTQEPAAQ

SEQ ID NO: 211 - protein, 198 aa, Streptococcus pyogenes
VLYPTPIAKLIDSYSKLPGIGIKTATRLAFYTIGMSNEDVNDFAKNLLAAKRELTYCSICGNLTDDDPCHICTDTSRDQTTILVVEDAKDVSAMEKIQEYHGYYHVLHGLISPMNGVGPDDINLKSLITRLMDGKVSEVIVATNATADGEATSMYISRVLKPAGIKVTRLARGLAVGSDIEYADEVTLLRAIENRTEL

SEQ ID NO: 212 - protein, 268 aa, Streptococcus pyogenes
MDMSKSNRRTWQGLVVILIAILTTFTTSTVTAARKIRNFPDTTEILLGTKATETPGILPFTGSYQLVLGDLDNLQRPTFAHIQLKDQDEPNIKRKGLKFNPPGWHNYKLTDANGKTTWLMDRGHLVGYQFSGLNDEPKNLVTMTKYLNTGFSDKNPLGMLYYENRLDSWLALHPNFWLDYKVTPVYHKNELVPRQVVLQYVGIDENGDLLQIKLGSEKESVDNFGVTSVTLDNVSPLAELDYQTGMMLDSTQNEEDSNLETEEFEEAA

SEQ ID NO: 213 - protein, 313 aa, Streptococcus pyogenes
MTSKKACLSSIIVLASLTCGNDTVSANHLSATGDKFDDCSTLVEKDVAPKDELEMLAWSSSQTTDDADRDYEDFLDDDSFISQNETDKMFENLTDDRLLNELDELDEENEEDEEDTIEPEQNVIMPSDDELFDLTDAVETRLTVSSAPHLEAELPKPHLRSLSDTALRSGEIRGHLDNKLDALSVTATKLALTMAQKFDLTTHVYSIGESFSEVLAAHYEDRKAESAFSKKKRFHLPIATPDVVIEELRRLVSSIGSSKEDVSVPYSRKLGMAVAKRKIALPQTGERFSYYPVLLGLMILGLTPIMIPKKINN

SEQ ID NO: 214 - protein, 382 aa, Streptococcus pyogenes
MAKDKEKQSDDKLVLTEWQKRNIEFLKKKKQQAEEEKKLKEKLLSDKKAQQQAQNASEAVELKTDEKTDSQEIESETTSKPKKTKKVRQPKEKSATQIAFQKSLPVLLGALLLMAVSIFMITPYSKKKEFSVRGNHQTNLDELIKASKVKASDYWLTLLTSPGQYERPILRTIPWVKSVHLSYQFPNHFLFNVIEFEIIAYAQVENGFQPILENGKRVDKVRASELPKSFLILNLKDEKAIQQLVKQLTTLPKKLVKNIKSVSLANSKTTADLLLIEMHDGNVVRVPQSQLTLKLPYYQKLKKNLENDSIVDMEVGIYTTTQEIENQPEVPLTPEQNAADKEGDKPGEHQEQTDNDSETPANQSSPQQTPPSPETVLEQAHG

SEQ ID NO: 215 - protein, 345 aa, Streptococcus pyogenes
MKRLKKIKWWLVGLLALISLLLALFFPLPYYIEMPGGAYDIRTVLQVNGKEDKRKGAYQFVAVGISRASLAQLLYAWLTPFTEISTAEDTTGGYSDADFLRINQFYMETSQNAAIYQALSLAGKPVTLDYKGVYVLDVNNESTFKGTLHLADTVTGVNGKQFTSSAELIDYVSHLKLGDEVTVQFTSDNKPKKGVGRIIKLKNGKNGIGIALTDHTSVNSEDTVIFSTKGVGGPSAGLMFTLDIYDQITKEDLRKGRTIAGTGTIGKDGEVGDIGGAGLKVVAAAEAGADIFFVPNNPVDKEIKKVNPNAISNYEEAKRAAKRLKTKMKIVPVTTVQEALVYLRK

SEQ ID NO: 216 - protein, 282 aa, Streptococcus pyogenes
MLEHKIDFMVTLEVKEANANGDPLNGNMPRTDAKGYGVMSDVSIKRKIRNRLQDMGKSIFVQANERIEDDFRSLEKRFSQHFTAKTPDKEIEEKANALWFDVRAFGQVFTYLKKSIGVRGPVSISMAKSLEPIVISSLQITRSTNGMEAKNNSGRSSDTMGTKHFVDYGVYVLKGSINAYFAEKTGFSQEDAEAIKEVLVSLFENDASSARPEGSMRVCEVFWFTHSSKLGNVSSARVFDLLEYHQSIEEKSTYDAYQIHLNQEKLAKYEAKGLTLEILEGL

SEQ ID NO: 217 - protein, 901 aa, Streptococcus pyogenes
MATKKVHIISHSHWDREWYMAYEQHHMRLINLIDDLLEVFQTDPDFHSFHLDGQTIILDDYLKVRPEREPEIRQAIASGKLRIGPFYILQDDFLTSSESNVRNMLIGKEDCDRWGASVPLGYFPDTFGNMGQTPQLMLKAGLQAAAFGRGIRPTGFNNQVDTSEKYSSQFSEISWQGPDNSRILGLLFANWYSNGNEIPTTEAEARLFWDKKLADAERFASTKHLLMMNGCDHQPVQLDVTKAIALANQLYPDYEFVHSCFEDYLADLADDLPENLSTVQGEITSQETDGWYTLANTASARIYLKQANTRVSRQLENITEPLAAMAYEVTSTYPHDQLRYAWKTLMQNHPHDSICGCSVDSVHREMMTRFEKAYEVGHYLAKEAAKQIADAIDTRDFPMDSQPFVLFNTSGHSKTSVAELSLTWKKYHFGQRFPKEVYQEAQEYLARLSQSFQIIDTSGQVRPEAEILGTSIAFDYDLPKRSFREPYFAIKVRLRLPITLPAMSWKTLALKLGNETTPSETVSLYDDSNQCLENGFLKVMIQTDGRLTITDKQSGLIYQDLLRFEDCGDIGNEYISRQPNHDQPFYADQGTIKLNIISNTAQVAELEIQQTFAIPISADKLLQAEMEAVIDITERQARRSQEKAELTLTTLIRMEKNNPRLQFTTRFDNQMTNHRLRVLFPTHLKTDHHLADSIFETVKRPNHPDATFWKNPSNPQHQECFVSLFDGENGVTIGNYGLNEYEILPDTNTIAITLLRSVGEMGDWGYFPTPEAQCLGKHSLSYSFESITKQTQFASYWRAQEGQVPVITTQTNQHEGTLAAEYSYLTGTNDQVALTAFKRRLADNALITRSYNLSNDKTCDFSLSLPNYNAKVTNLLEKDSKQSTPSQLGKAEILTLAWKKQ

SEQ ID NO: 218 - protein, 258 aa, Streptococcus pyogenes
MKITKIEKKKRLYLIELDNDESLYVTEDTIVRFMLSKDKVLDNDQLEDMKHFAQLSYGKNLALYFLSFQQRSNKQVADYLRKHEIEEHIIADIITQLQEEQWIDDTKLADTYIRQNQLNGDKGPQVLKQKLLQKGIASHDIDPILSQTDFSQLAQKVSQKLFDKYQEKLPPKALKDKITQALLTKGFSYDLAKHSLNHLNFDQDNQEIEDLLDKELDKQYRKLSRKYDGYTLKQKLYQALYRKGYNSDDINCKLRNYL

SEQ ID NO: 219 - protein, 221 aa, Streptococcus pyogenes
MICLLCQQISQTPISITEIIFLRRISSPICQQCQKSFQKIGKSVCATCCANSDIIACRDCLKWENKGYNVNHRSLYCYNAAMKAYFSQYKFQGDYLLRKVFAVELADVITKYYKGYIPVPVPVSPGCFRERQFNQVSAILEAANVSYLSLFEKLDNTHQSSRTKKERLLVEKSYRLLKVSNIPDKILIVDDIYTTGSTIIALRKQLAKVANSDIKSLSIAR

SEQ ID NO: 220 - protein, 337 aa, Streptococcus pyogenes
MKSFSLTFSFLNLLKYGTIKVMTKEFHHVTVLLHETVDMLDIKPDGIYVDATLGGSGHSAYLLSKLGEEGHLYCFDQDQKAIDNAQVTLKSYIDKGQVTFIKDNFRHLKARLTALGVDEIDGILYDLGVSSPQLDERERGFSYKQDAPLDMRMDRQSLLTAYEVVNTYPFNDLVKIFFKYGEDKFSKQIARKIEQARAIKPIETTTELAELIKAAKPAKELKKKGHPAKQIFQAIRIEVNDELGAADESIQDAMELLALDGRISVITFHSLEDRLTKQLFKEASTVDVPKGLPLIPEDMKPKFELVSRKPILPSHSELTANKRAHSAKLRVAKKIRK

SEQ ID NO: 221 - protein, 263 aa, Streptococcus pyogenes
VTTTEQELTLTPLRGKSGKAYKGTYPNGECVFIKLNTTPILPALAKEQIAPQLLWAKRMGNGDMMSAQEWLNGRTLTKEDMNSKQIIHILLRLHKSKKLVNQLLQLNYKIENPYDLLVDFEQNAPLQIQQNSYLQAIVKELKRSLPEFKSEVATIVHGDIKHSNWVITTSGMIFLVDWDSVRLTDRMYDVAYLLSHYIPRSRWSEWLSYYGYKNNDKVMQKIIWYGQFSHLTQILKCFDKRDMEHVNQEIYALRKFREIFRKK

SEQ ID NO: 222 - protein, 671 aa, Streptococcus pyogenes
MILTAPMSNLKGFGPKSAEKFQKLDIYTVEDLLLYYPFRYEDFKSKSVFDLVDGEKAVITGLVVTPANVQYYGFKRNRLSFKLRQGEAVLNVSFFNQPYLADKIELGQEVAVFGKWDATKSAITGMKVLAQVEDDMQPVYRVAQGISQSTLIKAIKSAFEIDAHLELKENLPATLLEKYRLMGRSQACLAMHFPKDITEYKQALRRIKFEELFYFQMNLQVLKAENKSETNGLPILYSKRAMETKISSLPFILTNAQKRSLDDILSDMSSGAHMNRLLQGDVGSGKTVIAGLSMYAAYTAGFQSALMVPTEILAEQHYISLQELFPDLSIAILTSGMKAAVKRTVLAAIANGSVDMIVGTHALIQDSVQYHKLGLVITDEQHRFGVKQRRIFREKGENPDVLMMTATPIPRTLAITAFGEMDVSIIDELPAGRKPIMTRWVKHEQLGTVLEWVKGELQKDAQVYVISPLIEESEALDLKNAVALHAELSTYFEGIAKVALVHGRMKNDEKDAIMQDFKDKKSHILVSTTVIEVGVNVPNATIMIIMDADRFGLSQLHQLRGRVGRGYKQSYAVLVANPKTDSGKKRMTIMTETTDGFVLAESDLKMRGSGEIFGTRQSGIPEFQVADIVEDYPILEEARKVSAAIVSDPNWIYEKQWQLVAQNIRKKEVYD

SEQ ID NO: 223 - protein, 1275 aa, Streptococcus pyogenes
MKKISKCAFVAISALVLIQATQTVKSQEPLVQSQLVTTVALTQDNRLLVEEIGPYASQSAGKEYYKHIEKIIVDNDVYEKSLEGERTFDINYQGIKINADLIKDGKHELTIVNKKDGDILITFIKKGDKVTFISAQKLGTTDHQDSLKKDVLSDKTVPQNQGTQKVVKSGKNTANLSLITKLSQEDGAILFPEIDRYSDNKQIKALTQQITKVTVNGTVYKDLISDSVKDTNGWVSNMTGLHLGTKAFKDGENTIVISSKGFEDVTITVTKKDGQIHFVSAKQKQHVTAEDRQSTKLDVTTLEKAIKEADAIIAKESNKDAVKDLAEKLQVIKDSYKEIKDSKLLADTHRLLKDTIESYQAGEVSINNLTEGTYTLNFKANKENSEESSMLQGAFDKRAKLVVKADGTMEISMLNTALGQFLIDFSIESKGTYPAAVRKQVGQKDINGSYIRSEFTMPIDDLDKLHKGAVLVSAMGGQESDLNHYDKYTKLDMTFSKTVTKGWSGYQVETDDKEKGVGTERLEKVLVKLGKDLDGDGKLSKTELEQIRGELRLDHYELTDISLLKHAKNITELHLDGNQITEIPKELFSQMKQLRFLNLRSNHLTYLDKDTFKSNAQLRELYLSSNFIHSLEGGLFQSLHHLEQLDLSKNRIGRLCDNPFEGLSRLTSLGFAENSLEEIPEKALEPLTSLNFIDLSQNNLALLPKTIEKLRALSTIVASRNHITRIDNISFKNLPKLSVLDLSTNEISNLPNGIFKQNNQLTKLDFFNNLLTQVEESVFPDVETLNLDVKFNQIKSVSPKVRALIGQHKLTPQKHIAKLEASLDGEKIKYHQAFSLLDLYYWEQKTNSAIDKELVSVEEYQQLLQEKGSDTVSLLNDMQVDWSIVIQLQKKASNGQYVTVDEKLLSNDPKDDLTGEFSLKDPGTYRIRKALITKKFATQKEHIYLTSNDILVAKGPHSHQKDLVENGLRALNQKQLRDGIYYLNASMLKTDLASESMSNKAINHRVTLVVKKGVSYLEVEFRGIKVGKMLGYLGELSYFVDGYQRDLAGKPVGRTKKAEVVSYFTDVTGLPLADRYGKNYPKVLRMKLIEQAKKDGLVPLQVFVPIMDAISKGSGLQTVFMRLDWASLTTEKAKVVKETNNPQENSHLTSTDQLKGPQNRQQEKTPTSPPSAATGIANLTDLLAKKATGQSTQETSKTDDTDKAEKLKQLVRDHQTSIEGKTAKDTKTKKSDKKHRSNQQSNGEESSSRYHLIAGLSSFMIVALGFIIGRKTLFK

SEQ ID NO: 224 - protein, 503 aa, Streptococcus pyogenes
MNKNKLLRVAMLLSLLAPTAESMTVLAQDVMLETHKATTNETSDSSSKEENNKNAAPTTSDKTDQGPLDASAETNSNSLVNADDKKRSDSSQSAIGSSDNKAEAENQVDDKSTDHSKSTDHSKPTDQPKPSPSKVDTAPASSLSKQLPEARTPIQSLSPYVSDLDLSEIDIPSVNTYAAYVEHWSGKNAYTHHLLSRRYGIKADQIDSYLKSTGIAYDSTRINGEKLLQWEKKSGLDVRAIVAIAMSESSLGTQGIATLLGANMFGYAAFDLDPTQASKFNDDSAIVKMTQDTIIKNKNSNFALQDLKAAKFSRGQLNFASDGGVYFTDTTGSGKRRAQIMEDLDKWIDDHGGTPAIPAELKVQSSASFASVPAGYKLSKSYDVLGYQASSYAWGQCTWYVYNRAKELGYQFDPFMGNGGDWKYKVGYALSKTPKVGYAISFAPGQAGADGTYGHVSIVEDVRKDGSILISESNCIGLGKISYRTFTAQQAEQLTYVIGKSKN

SEQ ID NO: 225 - protein, 995 aa, Streptococcus pyogenes
MDKHLLVKRTLGCVCAATLMGAALATHHDSLNTVKAEEKTVQVQKGLPSIDSLHYLSENSKKEFKEELSKAGQESQKVKEILAKAQQADKQAQELAKMKIPEKIPMKPLHGSLYGGYFRTWHDKTSDPTEKDKVNSMGELPKEVDLAFIFHDWTKDYSLFWKELATKHVPKLNKQGTRVIRTIPWRFLAGGDNSGIAEDTSKYPNTPEGNKALAKAIVDEYVYKYNLDGLDVDVEHDSIPKVDKKEDTAGVERSIQVFEEIGKLIGPKGVDKSRLFIMDSTYMADKNPLIERGAPYINLLLVQVYGSQGEKGGWEPVSNRPEKTMEERWQGYSKYIRPEQYMIGFSFYEENAQEGNLWYDINSRKDEDKANGINTDITGTRAERYARWQPKTGGVKGGIFSYAIDRDGVAHQPKKYAKQKEFKDATDNIFHSDYSVSKALKTVMLKDKSYDLIDEKDFPDKALREAVMAQVGTRKGDLERFNGTLRLDNPAIQSLEGLNKFKKLAQLDLIGLSRITKLDRSVLPANMKPGKDTLETVLETYKKDNKEEPATIPPVSLKVSGLTGLKELDLSGFDRETLAGLDAATLTSLEKVDISGNKLDLAPGTENRQIFDTMLSTISNHVGSNEQTVKFDKQKPTGHYPDTYGKTSLRLPVANEKVDLQSQLLFGTVTNQGTLINSEADYKAYQNHKIAGRSFVDSNYHYNNFKVSYENYTVKVTDSTLGTTTDKTLATDKEETYKVDFFSPADKTKAVHTAKVIVGDEKTMMVNLAEGATVIGGSADPVNARKVFDGQLGSETDNISLGWDSKQSIIFKLKEDGLIKHWRFFNDSARNPETTNKPIQEASLQIFNIKDYNLDNLLENPNKFDDEKYWITVDTYSAQGERATAFSNTLNNITSKYWRVVFDTKGDRYSSPVVPELQILGYPLPNADTIMKTVTTAKELSQQKDKFSQKMLDELKIKEMALETSLNSKIFDVTAINANAGVLKDCIEKRQLLKK

SEQ ID NO: 226 - protein, 185 aa, Streptococcus pyogenes
MIEASKLKAGMTFEAEGKLIRVLEASHHKPGKGNTIMRMKLRDVRTGSTFDTTYRPDEKFEQAIIETVPAQYLYKMDDTAYFMNTDTYDQYEIPVANVEQELLYILENSDVKIQFYGSEVIGVTVPTTVELTVAETQPSIKGATVTGSGKPATLETGLVVNVPDFIEAGQKLIINTAEGTYVSRA

SEQ ID NO: 227 - protein, 468 aa, Streptococcus pyogenes
MTKTLPKDFIFGGATAAYQAEGATHTDGKGPVAWDKYLEDNYWYTAEPASDFYNRYPVDLKLSEEFGVNGIRISIAWSRIFPTGKGEVNPKGVEYYHNLFAECHKRHVEPFVTLHHFDTPEALHSDGDFLNRENIEHFVNYAEFCFKEFSEVNYWTTFNEIGPIGDGQYLVGKFPPGIQYDLAKVFQSHHNMMVSHARAVKLFKDSGYSGEIGVVHALPTKYPFDANNPDDVRAAELEDIIHNKFILDATYLGKYSDKTMEGVNHILEVNGGELDLREEDFAALDAAKDLNDFLGINYYMSDWMQAFDGETEIIHNGKGEKGSSKYQIKGVGRRKAPVDVPKTDWDWIIFPQGLYDQIMRVKADYPNYKKIYITENGLGYKDEFVDNTVYDGGRIDYVKKHLEVISDAISDGANVKGYFMWSLMDVFSWSNGYEKRYGLFYVDFETQERYPKKSAYWYKKVAETQVIE

SEQ ID NO: 228 - protein, 1165 aa, Streptococcus pyogenes
MKKKVNQGSKRYQYLLKKWGIGFVIAATGTVVLGCTPSILTHQVAAKTIVGLARDEAQQGDGNAKSGDGLQSSSKEAKPVLDSSSANPASIAEHHLRMHFKTLPAGESLGSLGLWVWGDVDQPSKDWPNGAITMTKAKKDDYGYYLDVPLAAKHRQQVSYLINNKAGENLSKDQHISLLTPKMNEVWIDENYHAHAYRPLKKGYLRINYHNQSGHYDNLAVWTFKDVKTPTTDWPNGLDLSHKGHYGAYVDVPLKEGANEIGFLILDKSKTGDAIKVQPKDYLFKELDNHTQVFVKDTDPKVYNNPYYIDQVSLKGAEQTTPNEIKAIFTTLDGLDEDAVKQNIKITDKAGKTVAIDELTLDRDKSVMTLKGDFKAQGAVYTVTFGEVSQVARQSWQLKDKLYAYDGELGATLAKDGSVDLALWSPSADTVKVVVYDKQDQTRVVGQADLTKSDKGVWRAHLTSDSVKGISDYTGYYYLYEITRGQEKVMVLDPYAKSLAAWNDATATDDIKTAKAAFIDPSKLGPTGLDFAKINNFKKREDAIIYEAHVRDFTSDKALEGKLTHPFGTFSAFVEQLDYLKDLGVTHVQLLPVLSYFYANELDKSRSTAYTSSDNNYNWGYDPQHYFALSGMYSANPNDPALRIAELKNLVNEIHKRGMGVIFDVVYNHTARTYLFEDLEPNYYHFMNADGTARESFGGGRLGTTHAMSRRILVDSITYLTREFKVDGFRFDMMGDHDAAAIEQAFKAAKAINPNTIMIGEGWRTYQGDEGKKEIAADQDWMKATNTVGVFSDDIRNTLKSGFPNEGTAAFITGGAKNLEGLFKTIKAQPGNFEADAPGDVVQYIAAHDNLTLHDVIAKSINKDPKVAEEEIHKRIRLGNTMILTAQGTAFIHSGQEYGRTKQLLNPDYKTKASDDKVPNKATLIDAVAQYPYFIHDSYDSSDAVNHFDWAKATDSIAHPISNQTKAYTQGLIALRRSTDAFTKATKAEVDRDVTLITQAGQDGIQQEDLIMGYQTVASNGDRYAVFVNADNKTRKVVLPQAYRYLLGAQVLVDAEQAGVTAIAKPKGVQFTKEGLTIEGLTALVLKVSSKTANPSQQKSQTDNHQTKTPDGSKDLDKSLMTRPKRAKTNQKLPKTGEASSKGLLAAGIALLLLAISLLMKRQKD

SEQ ID NO: 229 - protein, 440 aa, Streptococcus pyogenes
MKNYLSIGVIALLFALTFGTVKSVQAIAGYGWLPDRPPINNSQLVVSMAGIVEGTDKKVFINFFEIDLTSQPAHGGKTEQGLSPKSKPFATDNGAMPHKLEKADLLKAIQKQLIANVHSNDGYFEVIDFASDATITDRNGKVYFADKDGSVTLPTQPVQEFLLKGHVRVRPYKEKPVQNQAKSVDVEYTVQFTPLNPDDDFRPGLKDTKLLKTLAIGDTITSQELLAQAQSILNKTHPGYTIYERDSSIVTHDNDIFRTILPMDQEFTYHVKNREQAYEINPKTGIKEKTNNTDLVSEKYYVLKQGEKPYDPFDRSHLKLFTIKYVDVNTNELLKSEQLLTASERNLDFRDLYDPRDKAKLLYNNLDAFDIMDYTLTGKVEDNHDKNNRVVTVYMGKRPKGAKGSYHLAYDKDLYTEEERKAYSYLRDTGTPIPDNPKDK

SEQ ID NO: 230 - protein, 348 aa, Streptococcus pyogenes
MLTSKHHNLNKLVWRYGLTSAAAVLLAFGGGASSVKAEVSSTTMTSSQRESKIKEIEESLKKYPEVSNEKFWERKWYGTYFKEEDFQKELKDFTEKRLKEILDLIGKSGIKGDRGETGPAGPAGPQGKTGERGAQGPKGDRGEQGIQGKAGEKGERGEKGDKGETGERGEKGEAGIQGPQGEAGKDGAPGKDGAPGEKGEKGDRGETGAQGPVGPQGEKGETGAQGPAGPQGEAGKPGEQGPAGPQGEAGQPGEKAPEKSPEGEAGQPGEKAPEKSKEVTPAAEKPADKEANQTPERRNGNMAKTPVANNHRRLPATGEQANPFFTAAAVAVMTTAGVLAVTKRKENN

SEQ ID NO: 231 - protein, 188 aa, Streptococcus pyogenes
MILLIDNYDSFTYNLAQYLSEFDETIVLYNQDPNLYDMAKKANALVLSPGPGWPKEANQMPKLIQDFYQTKPILGVCLGHQAIAETLGGTLRLAKRVMHGRQSTIETQGPASLFRSLPQEITVMRYHSIVVDQLPKGFSVTARDCDDQEIMAFEHHTLPLFGLQFHPESIGTPDGMTMIANFIAAIPR

SEQ ID NO: 232 - protein, 542 aa, Streptococcus pyogenes
VSKYLKYFSIITLFLTGLILVACQQQKPQTKERQRKQRPKDELVVSMGAKLPHEFDPKDRYGVHNEGNITHSTLLKRSPELDIKGELAKTYHLSEDGLTWSFDLHDDFKFSNGEPVTADDVKFTYDMLKADGKAWDLTFIKNVEVVGKNQVNIHLTEAHSTFTAQLTEIPIVPKKHYNDKYKSNPIGSGPYMVKEYKAGEQAIFVRNPYWHGKKPYFKKWTWVLLDENTALAALESGDVDMIYATPELADKKVKGTRLLDIPSNDVRGLSLPYVKKGVITDSPDGYPVGNDVTSDPAIRKALTIGLNRQKVLDTVLNGYGKPAYSIIDKTPFWNPKTAIKDNKVAKAKQLLTKAGWKEQADGSRKKGDLDAAFDLYYPTNDQLRANLAVEVAEQAKALGITIKLKASNWDEMATKSHDSALLYAGGRHHAQQFYESHHPSLAGKGWTNITFYNNPTVTKYLDKAMTSSDLDKANEYWKLAQWDGKTGASTLGDLPNVWLVSLNHTYIGDKRINVGKQGVHSHGHDWSLLTNIAEWTWDESTK

SEQ ID NO: 233 - protein, 825 aa, Streptococcus pyogenes
VKKTYGYIGSVAAILLATHIGSYQLGKHHMGSATKDNQIAYIDDSKGKAKAPKTNKTMDQISAEEGISAEQIVVKITDQGYVTSHGDHYHFYNGKVPYDAIISEELLMTDPNYRFKQSDVINEILDGYVIKVNGNYYVYLKPGSKRKNIRTKQQIAEQVAKGTKEAKEKGLAQVAHLSKEEVAAVNEAKRQGRYTTDDGYIFSPTDIIDDLGDAYLVPHGNHYHYIPKKDLSPSELAAAQAYWSQKQGRGARPSDYRPTPAPAPGRRKAPIPDVTPNPGQGHQPDNGGYHPAPPRPNDASQNKHQRDEFKGKTFKELLDQLHRLDLKYRHVEEDGLIFEPTQVIKSNAFGYVVPHGDHYHIIPRSQLSPLEMELADRYLAGQTEDDDSGSDHSKPSDKEVTHTFLGHRIKAYGKGLDGKPYDTSDAYVFSKESIHSVDKSGVTAKHGDHFHYIGFGELEQYELDEVANWVKAKGQADELAAALDQEQGKEKPLFDTKKVSRKVTKDGKVGYMMPKDGKDYFYARDQLDLTQIAFAEQELMLKDKKHYRYDIVDTGIEPRLAVDVSSLPMHAGNATYDTGSSFVIPHIDHIHVVPYSWLTRDQIATIKYVMQHPEVRPDIWSKPGHEESGSVIPNVTPLDKRAGMPNWQIIHSAEEVQKALAEGRFATPDGYIFDPRDVLAKETFVWKDGSFSIPRADGSSLRTINKSDLSQAEWQQAQELLAKKNAGDATDTDKPKEKQQADKSNENQQPSEASKEEEKESDDFIDSLPDYGLDRATLEDHINQLAQKANIDPKYLIFQPEGVQFYNKNGELVTYDIKTLQQINP

SEQ ID NO: 234 - protein, 379 aa, Streptococcus pyogenes
MRRAENNKHSRYSIRKLSVGVTSIAIASLFLGKVAYAVDGIPPISLTQKTTATTSENWHHIDKDGLIPLGISLEAAKEEFKKEVEESRLSEAQKETYKQKIKTAPDKDKLLFTYHSEYMTAVKDLPASTESTTQPVEAPVQETQASASDSMVTGDSTSVTTDSPEETPSSESPVAPALSEAPAQPAESEEPSVAASSEETPSPSTPAAPETPEEPAAPSPSPESEEPSVAAPSEETPSPETPEEPAAPSQPAESEESSVAATTSPSPSTPAESETQTPPAVTKDSDKPSSAAEKPAASSLVSEQTVQQPTSKRSSDKKEEQEQSYSPNRSLSRQVRAHESGKYLPSTGEKAQPLFIATMTLMSLFGSLLVTKRQKETKK

SEQ ID NO: 235 - protein, 1181 aa, Streptococcus pyogenes
LRKKQKLPFDKLAIALMSTSILLNAQSDIKANTVTEDTPATEQAVETPQPTAVSEEAPSSKETKTPQTPDDAEETIADDANDLAPQAPAKTADTPATSKATIRDLNDPSQVKTLQEKAGKGAGTVVAVIDAGFDKNHEAWRLTDKTKARYQSKEDLEKAKKEHGITYGEWVNDKVAYYHDYSKDGKTAVDQEHGTHVSGILSGNAPSETKEPYRLEGAMPEAQLLLMRVEIVNGLADYARNYAQAIIDAVNLGAKVINMSFGNAALAYANLPDETKKAFDYAKSKGVSIVTSAGNDSSFGGKTRLPLADHPDYGVVGTPAAADSTLTVASYSPDKQLTETATVKTADQQDKEMPVLSTNRFEPNKAYDYAYANRGMKEDDFKDVKGKIALIERGDIDFKDKIANAKKAGAVGVLIYDNQDKGFPIELPNVDQMPAAFISRKDGLLLKENPQKTITFNATPKVLPTASGTKLSRFSSWGLTADGNIKPDIAAPGQDILSSVANNKYAKLSGTSMSAPLVAGIMGLLQKQYETQYPDMTPSERLDLAKKVLMSSATALYDEDEKAYFSPRQQGAGAVDAKKASAATMYVTDKDNTSSKVHLNNVSDKFEVTVTVHNKSDKPQELYYQATVQTDKVDGKLFALAPKALYETSWQKITIPANSSKQVTIPIDVSQFSKDLLAPMKNGYFLEGFVRFKQDPTKEELMSIPYIGFRGDFGNLSALEKPIYDSKDGSSYYHEANSDAKDQLDGDGLQFYALKNNFTALTTESNPWTIIKAVKEGVENIEDIESSEITETIFAGTFAKQDDDSHYYIHRHANGKPYAAISPNGDGNRDYVQFQGTFLRNAKNLVAEVLDKEGNVVWTSEVTEQVVKNYNNDLASTLGSTRFEKTRWDGKDKDGKVVANGTYTYRVRYTPISSGAKEQHTDFDVIVDNTTPEVATSATFSTEDRRLTLASKPKTSQPVYRERIAYTYMDEDLPTTEYISPNEDGTFTLPEEAETMEGATVPLKMSDFTYVVEDMAGNITYTPVTKLLEGHSNKPEQDGSDQAPDKKPETKPEQDGSGQAPDKKPETKPEQDGSGQTPDKKPETKPEQDGSGQTPDKKPETKPEKDSSGQTPGKTPQKGQPSRTLEKRSSKRALATKASTKDQLPTTNDKDTNRLHLLKLVMTTFFLGLVAHIFKTKRTED

SEQ ID NO: 236 - protein, 308 aa, Streptococcus pyogenes
MNIRNKIENSKTLLFTSLVAVALLGATQPVSAETYTSRNFDWSGDDWSGDDWPEDDWSGDGLSKYDRSGVGLSQYGWSKYGWSSDKEEWPEDWPEDDWSSDKKDETEDKTRPPYGEALGTGYEKRDDWGGPGTVATDPYTPPYGGALGTGYEKRDDWGGPGTVATDPYTPPYGGALGTGYEKRDDWRGPGHIPKPENEQSPNPLHIPEPPQIEWPQWNGFDGLSFGPSDWGQSEDTPPSEPRVPEKPQHTPQKNPQESDFDRGFSAGLKAKNSGRGIDFEGFQYGGWSDEYKKGYMQAFGTPYTPSAT

SEQ ID NO: 237 - protein, 484 aa, Streptococcus pyogenes
MAKNNTNRHYSLRKLKTGTASVAVALTVLGAGFANQTEVKANGDGNPREVIEDLAANNPAIQNIRLRYENKDLKARLENAMEVAGRDFKRAEELEKAKQALEDQRKDLETKLKELQQDYDLAKESTSWDRQRLEKELEEKKEALELAIDQASRDYHRATALEKELEEKKKALELAIDQASQDYNRANVLEKELETITREQEINRNLLGNAKLELDQLSSEKEQLTIEKAKLEEEKQISDASRQSLRRDLDASREAKKQVEKDLANLTAELDKVKEDKQISDASRQGLRRDLDASREAKKQVEKDLANLTAELDKVKEEKQISDASRQGLRRDLDASREAKKQVEKALEEANSKLAALEKLNKELEESKKLTEKEKAELQAKLEAEAKALKEQLAKQAEELAKLRAGKASDSQTPDTKPGNKAVPGKGQAPQAGTKPNQNKAPMKETKRQLPSTGETANPFFTAAALTVMATAGVAAVVKRKEEN

SEQ ID NO: 238 - protein, 541 aa, Streptococcus pyogenes
MKKRKLLAVTLLSTILLNSAVPLVVADTSLRNSTSSTDQPTTADTDTDDESETPKKDKKSKETASQHDTQKDHKPSHTHPTPPSNDTKQTDQASSEATDKPNKDKNDTKQPDSSDQSTPSPKDQSSQKESQNKDGRPTPSPDQQKDQTPDKTPEKSADKTPEKGPEKATDKTPEPNRDAPKPIQPPLAAAPVFIPWRESDKDLSKLKPSSRSSAAYVRHWTGDSAYTHNLLSRRYGITAEQLDGFLNSLGIHYDKERLNGKRLLEWEKLTGLDVRAIVAIAMAESSLGTQGVAKEKGANMFGYGAFDFNPNNAKKYSDEVAIRHMVEDTIIANKNQTFERQDLKAKKWSLGQLDTLIDGGVYFTDTSGSGQRRADIMTKLDQWIDDHGSTPEIPEHLKITSGTQFSEVPVGYKRSQPQNVLTYKSETYSFGQCTWYAYNRVKELGYQVDRYMGNGGDWQRKPGFVTTHKPKVGYVVSFAPGQAGADATYGHVAVVEQIKEDGSILISESNVMGLGTISYRTFTAEQASLLTYVVGDKLPRP

SEQ ID NO: 239 - protein, 398 aa, Streptococcus pyogenes
MNKKKLGVRLLSLLALGGFVLANPVFADQNFARNEKEAKDSAITFIQKSAAIKAGARSAEDIKLDKVNLGGELSGSNMYVYNISTGGFVIVSGDKRSPEILGYSTSGSFDANGKENIASFMESYVEQIKENKKLDTTYAGTAEIKQPVVKSLLDSKGIHYNQGNPYNLLTPVIEKVKPGEQSFVGQHAATGCVATATAQIMKYHNYPNKGLKDYTYTLSSNNPYFNHPKNLFAAISTRQYNWNNILPTYSGRESNVQKMAISELMADVGISVDMDYGPSSGSAGSSRVQRALKENFGYNQSVHQINRGDFSKQDWEAQIDKELSQNQPVYYQGVGKVGGHAFVIDGADGRNFYHVNWGWGGVSDGFFRLDALNPSALGTGGGAGGFNGYQSAVVGIKP

SEQ ID NO: 240 - protein, 271 aa, Streptococcus pyogenes
MNLLGSRRVFSKKCRLVKFSMVALVSATMAVTTVTLENTALARQTQVSNDVVLNDGASKYLNEALAWTFNDSPNYYKTLGTSQITPALFPKAGDILYSKLDELGRTRTARGTLTYANVEGSYGVRQSFGKNQNPAGWTGNPNHVKYKIEWLNGLSYVGDFWNRSHLIADSLGGDALRVNAVTGTRTQNVGGRDQKGGMRYTEQRAQEWLEANRDGYLYYEAAPIYNADELIPRAVVVSMQSSDNTINEKVLVYNTANGYTINYHNGTPTQK

SEQ ID NO: 241 - protein, 778 aa, Streptococcus pyogenes
MRFLELLQKKFFPKAYQEKQFLMHQKTRLTPQHNQKQYSPNANHLDSSATKNSEQDPATALQRSRAYEGSPKSRPAWLQKLEAVLPSPQRPIRRFWRRYHIGKLLMILIGTLVLLLGSYLFYLSKTAKVSDLQDALKATTVIYDHKGEYAGSLSGQKGSYVELNAISDDLENAVIATEDRTFYSNSGINLKRFLLAVVTAGRFGGGSTITQQLAKNAYLSQDQTIKRKAREFFLALELTKKYSKKDILTMYLNNSYFGNGVWGVEDASQKYFGTTAANLTLDEAATLAGMLKGPEIYNPYHSLKNATHRRDTVLGAMVDAKKITQTKAQQARAVGLKNRLADTYVGKTDDYKYPSYFDAVISEAIATYGLSEKDIVNNGYKVYTELDQNYQTGMQTTFNNDELFPVSAYDGSSAQAASVALDPKTGGVRGLIGRVNSSENPTFRSFNYATQAKRSPASTIKPLVVYAPAVASGWSIEKELPNTVQDFDGYQPHNYGNYESEDVPMYQALANSYNIPAVSTLNDIGIDKAFTYGKTFGLDMSSAKKELGVALGGSVTTNPLEMAQAYAAFANNGVIHPAHLINRIENARGEVLKTFTDKAKRVVSQSVADKMTAMMLGTFSNGTAVNANVYGYTLAGKTGTTETNFNPDLAGDQWVIGYTPDVVISQWVGFNQTDENHYLTDSSAGTASAIFSTQASYILPYTKGSQFHVDNAYAQNGISAVYGVNETGNQSGVDTQSIIDGLRKSAQEASQSLSKAVDQSGLRDKAQSIWKEIVDYFR

SEQ ID NO: 242 - protein, 732 aa, Streptococcus pyogenes
MVSLEEDKVTVQPDIKVIKRDGRLVNFDSTKIYSALLKASMKVTRMSPLVEAKLEAISDRIIAEIIERFPTNIKIYEIQNIVEHKLLAANEYAIAKEYINYRTQRDFARSQATDINFSIDKLINKDQTVVNENANKDSDVFNTQRDLTAGIVGKSIGLKMLPSHVANAHQKGDIHYHDLDYSPYTPMTNCCLIDFKGMLANGFKIGNAEVESPKSIQTATAQISQIIANVASSQYGGCTADRIDEFLAPYAELNFKKHMADAKKWIVETKRESYAFEKTQKDIYDAMQSLEYEINTLFTSNGQTPFTSLGFGLGTSWFEREIQKAILTIRINGLGSEHRTAIFPKLIFTVKRGLNLEPDSPNYDIKTLALECATKRMYPDMLSYDKIIDLTGSFKSPMGCRSFLQGWKDENGQDVTSGRMNLGVVTLNLPRIAMESNGDMDKFWELFNERMLISKDALIYRVERVTEAKPANAPILYQYGAFGKRLEKTGNVNDLFKNRRATVSLGYIGLYEVASVFYGGQWEGNPDAKAFTLSIVKAMKQACEDWSDEYGYHFSVYSTPSESLTDRFCRLDTEKFGIVTDITDKEYYTNSFHYDVRKSPTPFEKLDFEKDYPEAGASGGFIHYCEYPVLQQNPKALEAVWDYAYDRVGYLGTNTPIDKCYNCQFEGDFTPTERGFTCPNCGNNDPKTVDVVKRTCGYLGNPQARPMVNGRHKEISARVKHMNGSTIKYPGL

SEQ ID NO: 243 - protein, 255 aa, Streptococcus pyogenes
MRRNYSRVIDELRTDYGLNLVAIGQRLGTDPRTVGKWWQGKHNPNQESRKKLNRLYREVKETMMTQVNIFEEANDNTKQVMQVITTTNFHGQPLDIYGDIQEPLFLARAVAEMIDYTKTSQGYYDVQAMLRKVDEDEKLKGMALEGTTKNFRSGQKVWFLTEHGLYEVLMRSNKPKAKEFRKAVKNILKEIRLNGYYMQGELVQELAQPSTQKLPGISDLTYILNKLADLVDMDNLADISNGIDRVQQLVKLISL

SEQ ID NO: 244 - protein, 204 aa, Streptococcus pyogenes
MFKKENLKQRYFNFGLVALALTILAIIFAFSSKNADTKSYAKKSESKMVTIDKAPKNNHAITKEESKEKAKSIASEPIPTVENSVAPTVTEEVPVVQQEVTQTVQQVSSVAYNPNNVVLSNGNTAGIVGSQAAAQMAAATGVPQSTWEHIIARESNGNPNAANASGASGLFQTMPGWGSTATVEDQVNAALKAYSAQGLSAWGY

SEQ ID NO: 245 - protein, 858 aa, Streptococcus pyogenes
MKNNNKWIIAGLASFLFPLSIIFIILLSMGIYYNSDKTILASDAFHQYVIFAQNFRNIMHGSDSFFYTFTSGLGINFYALMCYYLGSFFSPLLFFFNLTSMPDAIYLFTLIKFGLIGLAACYSFHRLYPKISAFLMISISVFYSLMSFLTSQMELNSWLDVFILLPLVILGLNKLITENKTRTYYLSISLLFIQNYYFGYMIALFCILYALVCLLRLNDFNKMFIAFVRFTAVSICAALTSALVILPTYLDLSTYGENLSPIKQLVTNNAWFLDIPAKLSIGVYDTTKFNALPMIYVGLFPLMLSVIYFTLESIPLKIKLANACLLTFIIISFYLQPLDLFWQGMHSPNMFLHRYAWSFSIVILLLACETLSRLKEVTQIKAGFAFIFLIILTSLPYSFSQQYNFLPLTLFLLSVFLLLGYTISLFSFRNSQIPSTFISAFILIFSLLESGLNTYYQLQGINKEWGFPSRQIYNSQLKDINNLVNSVSKNSQPFFRMERLLPQTGNDSMKFNYYGISQFSSVRNRLSSSLLDRLGFQSKGTNLNLRYQNNTIIMDSLLGIKYNLSEGPPNKFGFTKLKTSGNTTLYQNHYSSPLAILTRNVYKDVNLNVNTLDNQTKLLNQLSGKSLTYFNLQPAQLISGANQFNGQISAQASDYQNSVTLNYQINIPKHSQLYVSIPNIIFSNPDAKEMRIQTDNHNFIYTTDNAYSFFDLGYFADAKVATFSFVFPKNKQISFKEPHFYSLSIESYLEAMNSIKQKNVHTYAKSNTVITDYNSKTKGSLIFTLPYDKGWSAQKDGKNLPVKKAQGGFLSVTIPKGKGRVILTFIPNGFKLGLSLSCVGIIAYMLLYKYIDIKSKLL

SEQ ID NO: 246 - protein, 44 aa, Streptococcus pyogenes
FSRFLPTRRDYSSLWSASCRNEHYNSQHHHGVGTVSSKQNPRPL

SEQ ID NO: 247 - protein, 12 aa, Streptococcus pyogenes
SFIWEKRNPEGS

SEQ ID NO: 248 - protein, 47 aa, Streptococcus pyogenes
KGEEKTEVTKEKLLELARWIKDISDDTDEKTEDEAYYDGDGTEETTV

SEQ ID NO: 249 - protein, 32 aa, Streptococcus pyogenes
LYQKKRLKKSQRLSKLMTSRLLNKALMTSKIE

SEQ ID NO: 250 - protein, 10 aa, Streptococcus pyogenes
FVLQKYSLWQ

SEQ ID NO: 251 - protein, 57 aa, Streptococcus pyogenes
PISMQKAIQVIAIMVEQNVWILSKRLLLNVLRNFSVPHLPMFKPIPEVKPMQQLIWP

SEQ ID NO: 252 - protein, 35 aa, Streptococcus pyogenes
FRNIFCDFSCCSSFVSCYQKLKRKGYNRTSKKRFL

SEQ ID NO: 253 - protein, 11 aa, Streptococcus pyogenes
WVTGCKWWFFC

SEQ ID NO: 254 - protein, 48 aa, Streptococcus pyogenes
LMLKAKKTNSKLVTLSQPTKKFNLQKLFNQTNLLKPLSLWVLLQTTLS

SEQ ID NO: 255 - protein, 35 aa, Streptococcus pyogenes
PRNGWGRFERYERLGRTRHDHVNCYSRNGICSPSS

SEQ ID NO: 256 - protein, 35 aa, Streptococcus pyogenes
LMNCPSLHFLQPKHKEQPVLKMLKNYESKKQIVFK

SEQ ID NO: 257 - protein, 84 aa, Streptococcus pyogenes
KTTKCNYLKRPKLVESRLQRTRFRRICSRKHGRYRRWIRRFLIFLTNKSKKILVKRRVKRLLLSLLVTAPKESKKMELSQFLIG

SEQ ID NO: 258 - protein, 19 aa, Streptococcus pyogenes
GRRLPPRLPQEKSKWLLPY

SEQ ID NO: 259 - protein, 62 aa, Streptococcus pyogenes
FWSPGSRYFVRDANDCQRTGFSKCDFSWGTKCRYFLKFAGFSSVRKNVSIVNTGCWSGRPCP

SEQ ID NO: 260 - protein, 51 aa, Streptococcus pyogenes
CVPSVKCSIMIQINTPLSILFPNTLVQAGVIFRVYPIGFPLFLLEWQKSQQ

SEQ ID NO: 261 - protein, 35 aa, Streptococcus pyogenes
SDYFRHHAPFLKWLRSAKNNSKDIRCPYYYANGIR

SEQ ID NO: 262 - protein, 65 aa, Streptococcus pyogenes
LLLLKQTSKLNLLLKANQKRSGTKSSQVKWTASCLTTLKLTKLTLFLHKFTSWTTAKLLKLTLTQ

SEQ ID NO: 263 - protein, 38 aa, Streptococcus pyogenes
HLFVKDVWSTLKIWERCSVCYKKVVKKQELWQPRLYQK

SEQ ID NO: 264 - protein, 19 aa, Streptococcus pyogenes
LYAPQSLSNPFLDSIPCDQ

SEQ ID NO: 265 - protein, 61 aa, Streptococcus pyogenes
NRRDFLDNVVNLIRVTEPLGTSLVFDNFINRAAHININNIGLGIGLNEISCTFQPFCVTTK

SEQ ID NO: 266 - protein, 18 aa, Streptococcus pyogenes
QAPLDDHHNKPTYWSGYL

SEQ ID NO: 267 - protein, 75 aa, Streptococcus pyogenes
YFLKKTPLKAAKSWLLSPFGEMAKTGFPWAFFSKINLPSAFLKVPSVCRPLSEIVLVDTLVSEPRVTSPVKCLPT

SEQ ID NO: 268 - protein, 65 aa, Streptococcus pyogenes
SKNKRNTDTGCNNGKGSKSVSHNHSKNNHAKHISENAKEAAISRYNLPNERSNHITNTSSCKNSS

SEQ ID NO: 269 - protein, 30 aa, Streptococcus pyogenes
LFIHRSRLILDFLVINFSLFVQIYDDFLNG

SEQ ID NO: 270 - protein, 12 aa, Streptococcus pyogenes
SFIWEKRNPEGS

SEQ ID NO: 271 - protein, 50 aa, Streptococcus pyogenes
IKHLTQAKQRMPVSKVLVANPLGSKGIADSIQLRMKPLAVKRYRSSLSTR

SEQ ID NO: 272 - protein, 50 aa, Streptococcus pyogenes
PPPPNLPPACKTVKTVSTAGRPVLAWISTGIPRPSSTTVMELSASIKTLI

SEQ ID NO: 273 - protein, 32 aa, Streptococcus pyogenes
ENEFNQYYQDAKYKSHKERLTINTFKRQGYLR

SEQ ID NO: 274 - protein, 37 aa, Streptococcus pyogenes
TRVAPYFPQALAIFSEPVTLIASFKAFPSSSAASTAV

SEQ ID NO: 275 - protein, 81 aa, Streptococcus pyogenes
SPFTKSVLTPSALKLSSIKRPVKPPKNPVAVLAMSKRCKMRLTLMPLPPANLSSLAMRFTDPRFIWSILTIKSIEGFKVTV

SEQ ID NO: 276 - protein, 23 aa, Streptococcus pyogenes
DHNIYWHYQLKLSQVQTMTFPPL

SEQ ID NO: 277 - protein, 21 aa, Streptococcus pyogenes
PNLLDHFLPNNPHQNHKAKLD

SEQ ID NO: 278 - protein, 39 aa, Streptococcus pyogenes
QCLIIINNINFRHNKNTPSCILKRASLHDIIFHAETLLW

SEQ ID NO: 279 - protein, 137 aa, Streptococcus pyogenes
EKLFRTARQRYNFKWVSKKQIMGLVLIVFLKSRNRNSESKLFFYHIFGHIDLSNASINNNQVRSLQSLLFHPTVPSKKHFSHTGIIIWSHHCFNLKFTIIFLTRFAINKNNHSRNWTCPLNVRIIKGFNAHRLVNPK

SEQ ID NO: 280 - protein, 30 aa, Streptococcus pyogenes
DNCRGCLSTNLDNKTHSFTARFVTNCCNTF

SEQ ID NO: 281 - protein, 33 aa, Streptococcus pyogenes
IGSINQLVSFALVTMDEVKTLFKTLITPTFEEC

SEQ ID NO: 282 - protein, 39 aa, Streptococcus pyogenes
YQVCQLPEGVPQLIVNADQTWFYKAKTKQRTKKQWRSNQ

SEQ ID NO: 283 - protein, 20 aa, Streptococcus pyogenes
ILAKIEISQKTLITIIIMRS

SEQ ID NO: 284 - protein, 46 aa, Streptococcus pyogenes
FPDVNDKVIARDSRFFGKERTCLLSNRFWEVGDKKVETNPNNDIGD

SEQ ID NO: 285 - protein, 45 aa, Streptococcus pyogenes
KFNVTLLPLCQNELVITLFLFIFCHLLLLNRGANISSQKVIKEVR

SEQ ID NO: 286 - protein, 57 aa, Streptococcus pyogenes
ETSALLAARFIRSADSPKIIICLSPKRSGTKSSNSLPRSRPPAIKIKRLLSKPDKAF

SEQ ID NO: 287 - protein, 36 aa, Streptococcus pyogenes
KRLDDCTLIFFWCINLNTLKRFTFDTINFFDDNFWT

SEQ ID NO: 288 - protein, 45 aa, Streptococcus pyogenes
EWLSQQHSHQFLHDKRSYLDTAFDKGKCTFHKKPVLLLRWSSYLG

SEQ ID NO: 289 - protein, 38 aa, Streptococcus pyogenes
HDHLSHQQSLKQLGNLGLDSKHNHQNDKYYKESAAHRG

SEQ ID NO: 290 - protein, 69 aa, Streptococcus pyogenes
VMLKAPVKLIFKTRSKSSSVILSINLSLVMPALLTKTSIEPKLSIASLTIRLASDASETSPEMVTTVTP

SEQ ID NO: 291 - protein, 57 aa, Streptococcus pyogenes
RELSRFSSSAILLKPLVKVPPNRTMAPPNPPAAPLPGIVCKSMVVWQKTFLAKLLAI

SEQ ID NO: 292 - protein, 36 aa, Streptococcus pyogenes
EHFQPNHQIGQKWKKERPKPTWSKSDVAHKQTYQSP

SEQ ID NO: 293 - protein, 64 aa, Streptococcus pyogenes
KSRSLRTSSITSSTVFSSPTILVLSPSLVNICSGAFCWDSGLAHHGHLKGQPFKKTVVRIPGPS

SEQ ID NO: 294 - protein, 16 aa, Streptococcus pyogenes
RNEINTSSPTLSSTKI

SEQ ID NO: 295 - protein, 23 aa, Streptococcus pyogenes
CSLAAFTKFSKSAIVPKSGLTAV

SEQ ID NO: 296 - protein, 46 aa, Streptococcus pyogenes
EAMSCQRCCSFLADSSLIRYDLAKSSVVIAAMIFKMAWLSCGRRCG

SEQ ID NO: 297 - protein, 44 aa, Streptococcus pyogenes
NFKARPPGVVSGFPNITPTFSRNWLIKIAIVFVLLIEADNLRMA

SEQ ID NO: 298 - protein, 38 aa, Streptococcus pyogenes
KETCHYSHQHHVIFQAKFDRNFLPHPDKSGHQNCSIDG

SEQ ID NO: 299 - protein, 78 aa, Streptococcus pyogenes
ITLLTKQTQQLFRKPSLSNNLLKHLLVKRMSLSMFLKQKHQLTKPKASMLRPQNNKTTISFHHGGDQTIKIHGPTLTS

SEQ ID NO: 300 - protein, 20 aa, Streptococcus pyogenes
SGRQDSNLRHLGPKPSTLPS
